(19) United States
(12) Patent Application Publication
(10) Pub. No.: US 2026/0132392 A1
(43) Pub. Date: May 14, 2026

(54) GENE EDITING SYSTEMS COMPRISING REVERSE TRANSCRIPTASES

(71) Applicant: Metagenomi, Inc., Emeryville, CA (US)

(72) Inventors: Brian C. Thomas, Berleley, CA (US); Lisa Alexander, Albany, CA (US); Ketaki Belsare, Emeryville, CA (US); Christopher Brown, Albany, CA (US); Cindy Castelle, San Francisco, CA (US); Daniela S.A. Goltsman, Oakland, CA (US); Sourab Kulkarni, Emeryville, CA (US); Sarah Laperriere, Berkeley, CA (US); Leanna Monteleone, Emeryville, CA (US); Maria Jose Soto Contreras, Berkeley, CA (US); Morayma Temoche-Diaz, Emeryville, CA (US); Anu Thomas, Albany, CA (US); Mary Kaitlyn Chui, San Francisco, CA (US); Rebecca Lamothe, Emeryville, CA (US)

(21) Appl. No.: 19/122,601

(22) PCT Filed: Oct. 18, 2023
(86) PCT No.: PCT/US2023/077228

§ 371 Date: Apr. 18, 2025

Related U.S. Application Data
(60) Provisional application No. 63/380,194, filed on Oct. 19, 2022.
(60) Provisional application No. 63/386,658, filed on Dec. 8, 2022.
(60) Provisional application No. 63/387,268, filed on Dec. 13, 2022.
(60) Provisional application No. 63/491,269, filed on Mar. 20, 2023.
(60) Provisional application No. 63/500,228, filed on May 4, 2023.
(60) Provisional application No. 63/500,509, filed on May 5, 2023.
(60) Provisional application No. 63/510,861, filed on Jun. 28, 2023.

(51) Int. Cl. C12N 9/22; C12N 1/16; C12N 5/04; C12N 5/07; C12N 9/12; C12N 15/10; C12N 15/113; C12N 15/62; C12N 15/85

(52) U.S. Cl. CPC C12N 9/226; C12N 1/16; C12N 5/04; C12N 5/0601; C12N 9/1276; C12N 15/10; C12N 15/113; C12N 15/62; C12N 15/85; C12Y 207/07049; C12N 2310/20; C12N 2510/04; C12N 2750/14143

(57) ABSTRACT

The disclosure relates generally to gene editing systems comprising reverse transcriptases and fusion proteins of reverse transcriptases with nickases or nucleases, methods of making such reverse transcriptases and fusion proteins, and methods of using such reverse transcriptases and fusion proteins for site directed genome editing in cells.

### CROSS-REFERENCE

[0001] This application claims the benefit of and priority to U.S. Provisional Patent Application No. 63/380,194 filed Oct. 19, 2022, U.S. Provisional Patent Application No. 63/386,658 filed Dec. 8, 2022, U.S. Provisional Patent Application No. 63/387,268 filed Dec. 13, 2022, U.S. Provisional Patent Application No. 63/491,269 filed Mar. 20, 2023, U.S. Provisional Patent Application No. 63/500,228 filed May 4, 2023, U.S. Provisional Patent Application No. 63/500,509 filed May 5, 2023, and U.S. Provisional Patent Application No. 63/510,861 filed Jun. 28, 2023, each of which is incorporated by reference in its entirety herein.

### BRIEF SUMMARY

[0002] The disclosure is based, in part, upon the development of a gene editing system comprising a reverse transcriptase, a nuclease or nickase, and a guide RNA or pegRNA.

[0003] Described herein are fusion proteins comprising a nickase linked to a reverse transcriptase using a linker, wherein the reverse transcriptase comprises at least about 80% sequence identity to any one of SEQ ID NOs: 161-629, 767-1220, 1959-2522, and 2582-2585.

[0004] Described herein are fusion proteins comprising a nuclease linked to a reverse transcriptase using a linker, wherein the reverse transcriptase comprises at least about 80% sequence identity to any one of SEQ ID NOs: 161-629, 767-1220, 1959-2522, and 2582-2585.

[0005] Described herein are fusion proteins comprising a catalytically dead nuclease linked to a reverse transcriptase using a linker, wherein the reverse transcriptase comprises at least about 80% sequence identity to any one of SEQ ID NOs: 161-629, 767-1220, 1959-2522, and 2582-2585.

[0006] Described herein are gene editing systems, comprising a) a nickase; b) a guide nucleic acid configured to form a complex with the nickase and to hybridize to a target nucleic acid sequence; and c) a reverse transcriptase having at least about 80% sequence identity to any one of SEQ ID NOs: 161-629, 767-1220, 1959-2522, and 2582-2585 and configured to form a complex with the nickase. In some embodiments, the gene editing system further comprises a nucleic acid template. In some embodiments, the nickase is a modified endonuclease. In some embodiments, the modified endonuclease is a Type II CRISPR endonuclease. In some embodiments, the modified endonuclease is a Type V CRISPR endonuclease. In some embodiments, the Type II CRISPR endonuclease or the Type V CRISPR endonuclease has nickase activity. In some embodiments, the modified endonuclease is selected from the group consisting of spCas9 (H840A), spCas9 (D10A), nMG3-6 (D13A), nMG3-6 (H586A), nMG3-6 (N609A), Cas12a, and MG29-1. In some embodiments, the modified endonuclease comprises at least about 80% sequence identity to any one of SEQ ID NOs: 152-154. In some embodiments, the nickase and the reverse transcriptase are linked. In some embodiments, the nickase and the reverse transcriptase are linked by a linker. In some embodiments, the linker comprises at least 10, 20, or 30 amino acids. In some embodiments, the linker comprises about 30-35 amino acids. In some embodiments, the linker comprises about 30 amino acids. In some embodiments, the linker comprises at least 80% sequence identity to SEQ ID NO: 103. In some embodiments, the linker comprises at least 80% sequence identity to any one of SEQ ID NOs: 155-160. In some embodiments, the nickase and the reverse transcriptase are not linked. In some embodiments, the guide nucleic acid comprises a spacer sequence and a crRNA. In some embodiments, the guide nucleic acid further comprises a reverse transcriptase template (RTT). In some embodiments, a base in the RTT comprises a bulky modification selected from the group of complex sugars, or complex amino groups, and/or other modifications compatible with RNA. In some embodiments, the guide nucleic acid further comprises a primer binding site. In some embodiments, the primer binding site is on a 3′ end of the guide nucleic acid. In some embodiments, the primer binding site comprises at least 2, 4, 6, 8, 10, 13, 16, 20, 24, 28, 32, 36, 40, 45, 50, 55, 60, or 65 nucleotides. In some embodiments, the gene editing system further comprises a transposase, integrase, or homing endonuclease. In some embodiments, the gene editing system further comprises a retrotransposon. In some embodiments, the reverse transcriptase comprises a processivity of at least about 2-fold more than Moloney Murine Leukemia Virus (MMLV) reverse transcriptase. In some embodiments, the reverse transcriptase comprises a processivity of at least about 2-fold less than Moloney Murine Leukemia Virus (MMLV) reverse transcriptase. In some embodiments, the reverse transcriptase comprises an error rate of less than about 2.5%, 2.0%, 1.5%, 1%, 0.5%, 0.25%, 0.10%, or 0.05%. In some embodiments, the reverse transcriptase comprises an error rate of less than about 2.5%, 2.0%, 1.5%, 1%, 0.5%, 0.25%, 0.10%, or 0.05% as compared to Moloney Murine Leukemia Virus (MMLV) reverse transcriptase.

[0007] Described herein are gene editing systems, comprising a) a nuclease; b) a guide nucleic acid configured to form a complex with the nuclease and to hybridize to a target nucleic acid sequence; and c) a reverse transcriptase having at least about 80% sequence identity to any one of SEQ ID NOs: 161-629, 767-1220, 1959-2522, and 2582-2585 and configured to form a complex with the nuclease. In some embodiments, the gene editing system further comprises a nucleic acid template. In some embodiments, the nuclease is a double strand nuclease. In some embodiments, the nuclease is a Type II CRISPR endonuclease. In some embodiments, the CRISPR endonuclease is Cas9. In some embodiments, the Cas9 is catalytically dead Cas9 (dCas9). In some embodiments, the nuclease and the reverse transcriptase are linked. In some embodiments, the nuclease and the reverse transcriptase are linked by a linker. In some embodiments, the linker comprises at least 10, 20, or 30 amino acids. In some embodiments, the linker comprises about 30-35 amino acids. In some embodiments, the linker comprises about 30 amino acids. In some embodiments, the linker comprises at least 80% sequence identity to SEQ ID NO: 103. In some embodiments, the linker comprises at least 80% sequence identity to any one of SEQ ID NOs: 155-160. In some embodiments, the nuclease and the reverse transcriptase are not linked. In some embodiments, the guide nucleic acid further comprises a primer binding site. In some embodiments, the primer binding site is on a 3′ end of the guide nucleic acid. In some embodiments, the primer binding site comprises at least 2, 4, 6, 8, 10, 13, 16, 20, 24, 28, 32, 36, 40, 45, 50, 55, 60, or 65 nucleotides. In some embodiments, the gene editing system further comprises a transposase, integrase, or homing endonuclease. In some embodiments, the gene editing system further comprises a retrotransposon. In some embodiments, the reverse transcriptase comprises a processivity of at least about 2-fold more than Moloney Murine Leukemia Virus (MMLV) reverse transcriptase. In some embodiments, the reverse transcriptase comprises a processivity of at least about 2-fold less than Moloney Murine Leukemia Virus (MMLV) reverse transcriptase. In some embodiments, the reverse transcriptase comprises an error rate of less than about 2.5%, 2.0%, 1.5%, 1%, 0.5%, 0.25%, 0.10%, or 0.05%. In some embodiments, the reverse transcriptase comprises an error rate of less than about 2.5%, 2.0%, 1.5%, 1%, 0.5%, 0.25%, 0.10%, or 0.05% as compared to Moloney Murine Leukemia Virus (MMLV) reverse transcriptase.

[0008] Described herein are gene editing systems, comprising a) a nickase, b) a guide nucleic acid configured to form a complex with the nickase and to hybridize to a target nucleic acid sequence; and c) a reverse transcriptase configured to form a complex with the nickase, the reverse transcriptase having a X₁X₂DD motif, wherein X₁ is F or Y, and wherein when X₁ is Y, X₂ is A, R, N, D, C, E, Q, G, H, I, L, K, M, F, P, S, T, V, W, or Y. In some embodiments, the X₂ is A or I. In some embodiments, the X₁X₂DD motif is YADD (SEQ ID NO: 2572) or YIDD (SEQ ID NO: 2573). In some embodiments, the X₁X₂DD motif is FADD (SEQ ID NO: 2574), FVDD (SEQ ID NO: 2575), FIDD (SEQ ID NO: 2576), or FLDD (SEQ ID NO: 2577). In some embodiments, the reverse transcriptase has at least about 80% sequence identity to any one of SEQ ID NOs: 161-629, 767-1220, 1959-2522 and 2582-2585.

[0009] Described herein are gene editing systems, comprising a) a nuclease; b) a guide nucleic acid configured to form a complex with the nuclease and to hybridize to a target nucleic acid sequence; and c) a reverse transcriptase configured to form a complex with the nuclease, the reverse transcriptase having a X₁X₂DD motif, wherein X₁ is F or Y, and wherein when X₁ is Y, X₂ is A, R, N, D, C, E, Q, G, H, I, L, K, M, F, P, S, T, V, W, or Y. In some embodiments, the X₂ is A or I. In some embodiments, the X₁X₂DD motif is YADD (SEQ ID NO: 2572) or YIDD (SEQ ID NO: 2573). In some embodiments, the X₁X₂DD motif is FADD (SEQ ID NO: 2574), FVDD (SEQ ID NO: 2575), FIDD (SEQ ID NO: 2576), or FLDD (SEQ ID NO: 2577). In some embodiments, the reverse transcriptase has at least about 80% sequence identity to any one of SEQ ID NOs: 161-629, 767-1220, 1959-2522 and 2582-2585.

[0010] Described herein are isolated reverse transcriptases having at least about 80% sequence identity to any one of SEQ ID NOs: 161-629, 767-1220, 1959-2522, and 2582-2585.

[0011] Described herein are nucleic acids encoding for a fusion protein or a gene editing system as described above. In some embodiments, the nucleic acid is a DNA or an RNA. In some embodiments, the RNA is an mRNA. In some embodiments, nucleic acid is comprised in a vector. In some embodiments, the nucleic acid or the vector comprising the nucleic acid is comprised in an adeno-associated virus or a lipid nanoparticle. In some embodiments, the nucleic acid or the vector comprising the nucleic acid is comprised in a cell. In some embodiments, the cell is a human cell.

[0012] Described herein are methods for modifying a double- and/or single-stranded nucleic acid, comprising contacting a cell using a fusion protein or a gene editing system as described above.

[0013] Described herein are methods for modifying a double- and/or single-stranded nucleic acid in a cell comprising a) providing a cell with a guide nucleic acid to bind to a target strand of the nucleic acid; b) providing the cell with a nuclease or nickase to cleave the nucleic acid at a location of binding of the guide nucleic acid; c) providing the cell with a reverse transcriptase to synthesize a modification in the target strand of the nucleic acid at a location of cleavage by the nickase and/or nuclease. In some embodiments, the reverse transcriptase has at least about 80% sequence identity to any one of SEQ ID NOs: 161-629, 767-1220, 1959-2522, and 2582-2585. In some embodiments, the modification is an insertion, deletion, or mutation. In some embodiments, the method further comprises providing an RNA or DNA template to the cell. In some embodiments, the nucleic acid is a genome or a vector. In some embodiments, the method further comprises providing the cell with a transposase, integrase, or homing endonuclease. In some embodiments, the method further comprises providing the cell with a retrotransposon.

### BRIEF DESCRIPTION OF THE DRAWINGS

[0014] The novel features of the disclosure are set forth with particularity in the appended claims. A better understanding of the features and advantages of the present disclosure will be obtained by reference to the following detailed description that sets forth illustrative embodiments, in which the principles of the disclosure are utilized, and the accompanying drawings of which:

[0015] FIGS. 1A-1JJ are bar graphs showing the G-to-T conversion editing percentage of untethered reverse transcriptase (RT) candidates from the MG151 family with eight different primer binding site (PBS) nucleotides of varying length (PBS lengths of 2, 4, 6, 8, 10, 13, 16, and 20 nucleotides) in HEK293T cells. MG151 candidates 80-85 (FIGS. 1A-IF), 87-100 (FIGS. 1G-1T), and 102-117 (FIGS. 1U-1JJ) are shown with untreated samples, no RT, wild-type MMLV1, and wild-type MMLV2 as a control.

[0016] FIG. 2 is a bar graph showing the relative fold change of editing by untethered RT candidates from the MG151 family compared to wild-type MMLV editing normalized to 1. Seven untethered MG151 candidates (candidates 98, 100, 99, 102, 103, 104, and 105) with eight different PBS nucleotides of varying length (PBS lengths of 2, 4, 6, 8, 10, 13, 16, and 20 nucleotides) are shown. The bars represent a specific PBS length tested for each candidate.

[0017] FIGS. 3A-3W are bar graphs showing the G-to-T conversion editing percentage of untethered reverse transcriptase (RT) candidates from the MG153 family with eight different PBS nucleotides of varying length (PBS lengths of 2, 4, 6, 8, 10, 13, 16, and 20 nucleotides) in HEK293T cells. MG153 candidates 1-5, 7-13, 15, 16, and 21 (FIGS. 3A-30) and 14, 17-20, and 25-27 (FIGS. 3P-3W) are shown with untreated samples and wild-type MMLV1 as a control.

[0018] FIGS. 4A-4G are bar graphs showing the G-to-T conversion editing percentage of untethered reverse transcriptase (RT) candidates from the MG160 family with eight different PBS nucleotides of varying length (PBS lengths of 2, 4, 6, 8, 10, 13, 16, and 20 nucleotides) in HEK293T cells. MG160 candidates 1-6 and 8 (FIGS. 4A-4G) are shown with untreated samples and wild-type MMLV1 as a control.

[0019] FIGS. 5A-5G are bar graphs showing the G-to-T conversion editing percentage of RT candidates from the MG160 family tethered to spCas9(H840A). MG160 candidates 1-5 (FIGS. 5A-5G) tethered to spCas9(H840A) were tested in HEK293T cells for G-to-T conversion. The candidates are shown with untreated samples, wild-type MMLV1, wild-type MMLV2, spCas9(H840A)-MMLV1, and spCas9(H840A)-MMLV2 as controls.

[0020] FIGS. 6A-6D are bar graphs showing a blot of percent InDels after targeting the endogenous targets AAVS1 (FIG. 6A), B2M (FIG. 6B), CD5 (FIG. 6C), and CD38 (FIG. 6D) with the nuclease MG3-6 bound to pegRNA comprising PBS of different lengths (PBS lengths of 2, 4, 6, 8, 10, 13, 16, and 20 nucleotides) in HEK293T cells.

[0021] FIG. 7 depicts a schematic of an exemplary DNA construct for a GFP-based retrotransposition assay. The construct carries a cytomegalovirus promoter (CMVp) followed by the reverse transcriptase (RT-NLS) with an N-terminal tag (Flag-HA-NLS-MCP-linker). An EF1 alpha promoter (EF1α) in the reverse orientation drives the expression of GFP (GFPexon2 and GFPexon1) only following the successful retrotransposition of the construct into the target site specified by a nuclease (inverted intron). Target-primed reverse transcription is initiated following the binding of the primer binding site (PBS) with a 3′ overhang generated by the nuclease. NLS=Nuclear Localization Signal; MCP=MS2 coat protein; GFP=green fluorescent protein; pA=polyA sequence, MS2 loops=site for MS2 coat protein binding.

[0022] FIG. 8 depicts a diagram of a mechanism for targeted integration of retron-derived ssDNA by TnpA. The retron ncRNA (msr in grey and msd in black) contains the desired cargo flanked by structural motifs recognized by TnpA (top left, dashed box). The excised cargo (top right) is circularized by TnpA and finds the targeting motif on a ssDNA target, which is made available by binding of an RNA-guided effector (bottom right, grey). TnpA mediates integration of the ssDNA donor by cleavage of the target and the host repair machinery repairs the integrated edit (bottom left, dashed box).

[0023] FIGS. 9A-9R depict editing with untethered MG151 candidates MG151-118 through MG151-135 for G-to-T conversion across 8 different PBS lengths.

[0024] FIGS. 10A-10D depict editing with untethered MG151 candidates MG151-123 through MG151-126 for G-to-T conversion at PBS lengths 6, 8, 10, 13 nucleotides. Two biological replicates were performed for each candidate.

[0025] FIGS. 11A-11D depict editing with untethered MG151 family mutants for G-to-T conversion. FIG. 11A: MG151-98 wild type is shown in green bar alongside point mutations of MG151-98, combined mutations of MG151-98, and trimmed mutants of MG151-98. Single replicate is shown in FIG. 11A and additional replicate with various MG151-98 mutations are found in FIG. 11B. Mutations K297P and H171N significantly improve wild type MG151-98 activity. FIG. 11C: MG151-99 mutants and wild type MG151-99 have G-to-T conversion with some mutations increasing wild type activity. FIG. 11D: MG151-99 wild type is compared to trimmed versions of MG151-99. MG151-99 trimmed 152 AA significantly improves activity of G-to-T conversion, whereas trimming 136 AA inhibited editing activity. MMLV1 wildtype is shown in gold bars and MMLV2 (pentamutant) acts as controls for each experiment.

[0026] FIGS. 12A-12B depict untethered MG151 candidates (MG151-80 through MG151-135) tested for G-to-T conversion. Percent editing of G-to-T conversion (FIG. 12A) and fold change relative to MMLV wild type at PBS 13 (FIG. 12B). Each dot represents a different PBS length ranging from 2, 4, 6, 8, 10, 13, 16, and 20 nucleotides.

[0027] FIGS. 13A-13H depict editing with untethered MG153 candidates tested for G-to-T conversion across 8 different PBS lengths for different MG153 candidates. FIG. 13H shows MG153-53 editing when fused to Cas9.

[0028] FIGS. 14A-14B depict untethered MG153 candidates tested for G-to-T conversion. Percent editing of G-to-T conversion (FIG. 14A) and fold change to MMLV wild type at PBS 13 (FIG. 14A). Each dot represents a different PBS length ranging from 2, 4, 6, 8, 10, 13, 16, and 20 nucleotides.

[0029] FIGS. 15A-15U depict editing with spCas9(H840A) tethered to MG160 candidates for G-to-T conversion across 8 different PBS lengths.

[0030] FIGS. 16A-16B depict MG160 candidates tethered to spCas9(H840A) tested for G-to-T conversion. Percent editing of G-to-T conversion (FIG. 16A) and fold change to MMLV wild type at PBS 13 (FIG. 16B). Each dot represents a different PBS length ranging from 2, 4, 6, 8, 10, 13, 16, and 20 nucleotides.

[0031] FIGS. 17A-17D depict untethered candidates MG151-98 and MG151-99. RT candidates MG151-98 (FIG. 17A) and MG151-99 (FIG. 17B) were tested for performing 24 nt insertion. RT candidates MG151-98 (FIG. 17C) and MG151-99 (FIG. 17D) were tested for performing 15 nt deletion.

[0032] FIGS. 18A-18H depict MG151 candidates including MG151-123 (FIGS. 18A and 18E), MG151-124 (FIGS. 18B and 18F), MG151-125 (FIGS. 18C and 18G), and MG151-126 (FIGS. 18D and 18H) completing 24 nt insertion (FIGS. 18A-18D) and 15 nt deletion (FIGS. 18E-18H) over four PBS lengths.

[0033] FIGS. 19A-19D depict rational engineering of MG151-98. MG151-98 wild type is shown in the green bar alongside point mutations, combined mutations, and trimming of MG151-98. Performance of these mutations for 24 nt insertion (FIGS. 19A-19B), and 15 nt deletion (FIGS. 19C-19D) are represented above alongside controls MMLV1 and MMLV2.

[0034] FIGS. 20A-20D depict rational engineering of MG151-99. MG151-99 wild type shown in the green bar alongside point mutations, combined mutations, and trimming of MG151-99. Performance of these mutations for 24 nt insertion (FIGS. 20A-20B), and 15 nt deletion (FIGS. 20C-20D) are represented above alongside controls MMLLV1 and MMLV2.

[0035] FIGS. 21A-21H depict MG153 candidates tested for 24 nt flag insertion across 4 to 8 different PBS lengths.

[0036] FIGS. 22A-22H depict MG153 candidates tested for 15 nt deletion across 4 to 8 different PBS lengths.

[0037] FIGS. 23A-23H depict the editing efficiency of spCas9(H840A) tethered to MG160 candidates for 24 nt insertion at 4 to 8 different PBS lengths.

[0038] FIGS. 24A-24H depict the editing efficiency of spCas9(H840A) tethered to MG160 candidates for 15 nt insertion at 4 to 8 different PBS lengths.

[0039] FIGS. 25A-25D depict G-T transversion using RTs in combination with MG nickase MG3-6. Untethered (FIGS. 25A-25B) and tethered (FIGS. 25C-25D) systems were tested. RTs tested include MG151-98, MG151-24, MG153-53, MG160-4 and MG151-99.

[0040] FIGS. 26A-26C depict a screen of the ability of indicated control RTs and RT candidates to retrotranspose an RNA cargo containing GFP in mammalian cells at a target specified by Cas9. Successful retrotransposition was detected by measuring the percentage of GFP positive cells by flow cytometry in the indicated samples at 3, 6, and 8 days post-transfection of cells with RT-containing plasmid, Cas9-containing plasmid, and chemically synthesized guide RNAs. LINE-WT (WT LINE-1 RT), LINE-dead (D702Y LINE-1 RT, RT dead), NT (non-targeting guide), VEGFA (VEGFA targeting guide).

[0041] FIGS. 27A-27C depict the prime editing ability of the engineered RT's. FIG. 27A depicts prime editing percentage (y-axis) of MG160-4 RT across different PBS lengths (x-axis).

[0042] FIG. 27B depicts prime editing percentage (y-axis) of MG151-98 across different PBS lengths (x-axis). FIG. 27C depicts prime editing percentage (y-axis) of MG153-3RT across different PBS lengths (x-axis).

[0043] FIG. 28 depicts RT candidates' ability to efficiently generate full-length cDNA from large RNA templates in mammalian cells.

[0044] FIGS. 29A-29DD depict editing percentage of MG160 family candidates tethered to spCas9(H840A). Candidates from the MG160 family were tethered to spCas9(H840A) and were transfected in HEK293T cells to determine G-to-T editing on the VEGFA target. Chemically synthesized guides ranged from having primer binding site lengths from 2-20 nucleotides. Candidates MG160-473 (FIG. 29A), MG160-283(FIG. 29G), MG160-379 (FIG. 29L), MG160-395 (FIG. 29O), MG160-9 (FIG. 29P), and MG160-107 (FIG. 29CC) had comparable or better G-to-T editing levels (across multiple PBS lengths) to spCas9(H840A) tethered to MMLV WT. spCas9-PE1 and spCas9-PE2 were transfected alongside chemically synthesized pegRNA with PBS length of 13 nucleotides.

[0045] FIGS. 30A-30C depict editing percentage of G-to-T transversion, insertion, and deletion of selected MG160 candidates. With MG160 candidates tethered to spCas9(H840A), RTs were challenged to incorporate G-to-T transversion (FIG. 30A), 24 nucleotide insertion (FIG. 30B), and 15 nucleotide deletion (FIG. 30C) into the VEGFA target. MG160-107, MG160-473, MG160-283, MG160-379, and MG160-395 showed comparable or improved editing levels to spCas9(H840A) tethered to MMLV WT for all types of edits at various PBS lengths. MG160-473 showed comparable editing levels to spCas9(H840A) tethered to MMLV2 (hyperactive mutant). spCas9-PE1 and spCas9-PE2 were transfected alongside chemically synthesized pegRNA with PBS length of 13 nucleotides.

[0046] FIGS. 31A-31K depict editing percentage of unique reverse transcriptase candidates from MG retron families untethered with spCas9(H840A). Candidates from various MG retron families were transfected in an untethered format alongside nickase spCas9(H840A) into HEK293T cells to determine G-to-T editing on the VEGFA target. Chemically synthesized guides ranged from having primer binding site lengths from 2-20 nucleotides. Candidates MG173-1 (FIG. 31J) and MG173-2 (FIG. 31K) were active and showed above background levels of G-to-T editing across multiple PBS lengths. Controls MMLV1 and MMLV2 were untethered and transfected alongside spCas9(H840A) and chemically synthesized pegRNA with PBS length of 13 nucleotides.

[0047] FIGS. 32A-32D depict editing percentage of reverse transcriptase candidates from MG Group II intron families untethered with spCas9(H840A). Candidates from various MG group II intron families were transfected in an untethered format alongside nickase spCas9(H840A) into HEK293T cells to determine G-to-T editing on the VEGFA target. Chemically synthesized guides ranged from having primer binding site lengths from 2-20 nucleotides. Candidate MG169-1 (FIG. 32D) was slightly above background editing levels of G-to-T editing across multiple PBS lengths. Other MG candidates, MG164-5 (FIG. 32A), MG166-2 (FIG. 32B), and MG167-4 (FIG. 32C) did not show editing levels above background. Controls MMLV1 and MMLV2 were untethered and transfected alongside spCas9(H840A) and chemically synthesized pegRNA with PBS length of 13 nucleotides.

[0048] FIG. 33A-33D depict editing percentage of WT MG160-4 and engineered mutants tethered to spCas9(H840A). FIG. 33A shows editing percentage for seventeen engineered MG160-4 constructs tethered to spCas9(H840A) that were tested in HEK293T cells for G-to-T transversion on the VEGFA target. Chemically synthesized guides ranging from PBS lengths of 6 to 13 nucleotides were used to test conversion. Point mutations H230K and H230R showed a neutral change in G-to-T editing activity, whereas combining multiple mutations drastically reduced editing efficiency. FIG. 33B shows G-to-T conversion with selected point mutations, which show similar editing levels to WT MG160-4. MG160-4 (H230K) and MG160-4(H230R) were then tested for 24 nucleotide insertion (FIG. 33C) and 15 nucleotide deletion (FIG. 33D). MG160-4 (H230R) showed editing levels slightly better than MG160-4 WT and MG160-4 (H230K) at various desired edits. spCas9-PE1 and spCas9-PE2 were transfected alongside chemically synthesized pegRNA with PBS length of 13 nucleotides.

[0049] FIG. 34 depicts editing percentage of WT MG153-53 and engineered mutants. Six engineered MG153-53 constructs untethered and transfected alongside spCas9(H840A) were tested in HEK293T cells for G-to-T transversion on the VEGFA target. Chemically synthesized guides ranging from PBS lengths of 6 to 13 nucleotides were used to test conversion. Point mutations V200R showed an increase in G-to-T editing activity comparable to WT MG153-53, whereas combining multiple mutations drastically reduced editing efficiency. MG153-53 WT and engineered constructs had comparable or higher level editing than untethered controls TGIRT, marathon, and marathon mutant, but where drastically lower than untethered MMLV WT (MMLV1) and MMLV hyperactive mutant (MMLV2).

[0050] FIG. 35 depicts editing percentage of MG3-6(H586A) with selected RT candidates. MG3-6(H586A) nickase was combined with selected reverse transcriptases to make a desired correction in the AAVS1 target. Reverse transcriptases were either untethered (UT) and transfected alongside MG3-6(H586A) or tethered to MG3-6(H586A) either on the C terminus of the nickase I or the N terminus of the nickase (N). The pegRNA varied in PBS lengths from 8, 10, 13, and 20 nucleotides. Background editing was shown at less than 0.1% editing. All selected RTs showed above background editing with MG3-6(H586A) except for MG153-53. MG160-4 had improved activity when tethered to MG3-6(H586A) compared to an untethered condition. MG151-98 engineered candidates had slight preference for either being untethered or tethered to the N-terminus of MG3-6(H586A). WT MMLV (MMLV1) and hyperactive mutant MMLV (MMLV2) had highest editing levels when tethered to the C-terminus of MG3-6(H586A). Each data point represents a single biological replicate at different PBS lengths for each selected RT.

[0051] FIGS. 36A-36J depict editing percentage of untethered MG71-2(H883A) with selected RT candidates on AAVS1 target. FIG. 36A shows biological triplicate data for selected RT candidates performing a five nucleotide change on the AAVS1 target with untethered MG71-2n and chemically synthesized pegRNAs with PBS lengths 4, 6, 8, 10, 13, and 16 nucleotides. Select RT candidates were then tested for five nucleotide change (FIG. 36B), five nucleotide change with a modified scaffold in pegRNA (FIG. 36C), G-to-T transversion (FIG. 36D), 24 nucleotide insertion (FIG. 36E), and 15 nucleotide deletion (FIG. 36F). Additional engineered MG151-98 candidates, MG151-98 (166AA), MG151-98 (166AA, H171N), and MG151-98 (166AA, K297P), were tested for G-to-T change (FIG. 36G), 15 nucleotide deletion (FIG. 36H), 24 nucleotide insertion (FIG. 36I), and 5 nucleotide change (FIG. 36J) across PBS lengths 4, 6, 8, 10, 13, and 16 nucleotides. Above background levels of editing were defined as greater than 0.1%. Each graph represents a single biological replicate except for FIG. 36A which represents biological triplicate data.

[0052] FIGS. 37A-37C depict editing percentage of G-to-T transversion, insertion, and deletion of engineered MG151-98 mutants. With engineered MG151-98 candidates untethered to spCas9(H840A), RTs were challenged to incorporate G-to-T transversion (FIG. 37A), 24 nucleotide insertion (FIG. 37B), and 15 nucleotide deletion (FIG. 37C) into the VEGFA target. MG151-98 (Δ166AA) enhanced editing levels for most PBS lengths at all conditions. Specifically, combining trimmed MG151-98 constructs with point mutations H171N or K297P, editing levels further increased to achieve levels comparable or better that MMLV WT. spCas9(H840A) untethered with MMLV WT and MMLV2 were transfected alongside chemically synthesized pegRNA with PBS length of 13 nucleotides.

[0053] FIG. 38 depicts an overview of the mechanism to achieve programmable genome editing with Cas9, retron reverse transcriptase, and ssDNA transposase TnpA.

[0054] FIGS. 39A, 39B, and 39C depict an overview of the design principles used to generate engineered ncRNAs of Ec96. FIG. 39A depicts an overview of the 3 insertion sequences of 3 different lengths flanked by the LE/RE recognition motifs of Hp TnpA. FIG. 39B depicts a figure from the designated paper (Wang et al., Nature Microbiology (2022)) indicating the region of the msdDNA unresolved in the cryo-EM structure of Ec86 in complex with its product. FIG. 39C depicts the three different replaceable regions of the msd stem loop identified for Ec86 ncRNA.

[0055] FIG. 40 depicts the predicted secondary structures of engineered Ec86 ncRNAs which contain insertion of a 200nt or 500nt partial kanamycin gene flanked by the reverse complement (rc) LE/RE motifs of Hp TnpA. Motifs required for priming of reverse transcription, the msr and inverted repeats (IRs), are highlighted.

[0056] FIG. 41 depicts quantification of msdDNA production by qPCR in reactions that do or do not contain the Ec86 reverse transcriptase. WT is the wild-type ncRNA. LE40RE_v1 through v3, LE200RE_v1 and v3, and LE500RE v1 through v3 are engineered ncRNA designs.

[0057] FIG. 42 depicts confirmation of insertion by PCR of chimeric product generated by TnpA/retron system. PCR product indicated with arrow. Lane numbers correspond to the following: lane 1: LE200RE_v1 ncRNA, +RT, +TnpA; lane 2: LE200RE_v1 ncRNA, −RT, +TnpA; lane 3: LE200RE_v3 ncRNA, +RT, +TnpA; lane 4: LE200RE_v3 ncRNA, −RT, +TnpA; lane 5: LE500RE_v1 ncRNA, +RT, +TnpA; lane 6: LE500RE_v1 ncRNA, −RT, +TnpA; lane 7: LE500RE_v2 ncRNA, +RT, +TnpA; lane 8: LE500RE_v2 ncRNA, −RT, +TnpA; lane 9: LE500RE_v3 ncRNA, +RT, +TnpA; lane 10: LE500RE_v3 ncRNA, −RT, +TnpA; lane 11: LE200RE_v1 ncRNA, +RT, −TnpA; lane 12: LE200RE_v1 ncRNA, −RT, −TnpA; lane 13: LE200RE_v3 ncRNA, +RT, −TnpA; lane 14: LE200RE_v3 ncRNA, −RT, −TnpA; lane 15: LE500RE_v1 ncRNA, +RT, −TnpA; lane 16: LE500RE_v1 ncRNA, −RT, −TnpA; lane 17: LE500RE_v2 ncRNA, +RT, −TnpA; lane 18: LE500RE_v2 ncRNA, −RT, −TnpA; lane 19: LE500RE_v3 ncRNA, +RT, −TnpA; lane 20: LE500RE_v3 ncRNA, −RT, −TnpA.

[0058] FIG. 43 depicts Sanger sequencing results of the inserted ssDNA product made by TnpA, where the substrate for TnpA is generated by Ec86 retron. The highlighted region of the Sanger sequencing chromatogram shows the junction of the chimeric product where the 5′ sequence corresponds to the right end (RE) motif of Hp TnpA which is integrated along with the cargo and the 3′ sequence corresponds to the ssDNA target provided in the reaction mixture. FIG. 43 discloses SEQ ID NOs: 2578 and 2578, respectively, in order of appearance.

[0059] FIG. 44 depicts a method to confirm ncRNA prediction and msd insertion tolerance of retrons.

[0060] FIG. 45 depicts secondary structure predictions of retron ncRNAs from the MG154 family, highlighting the 5′ and 3′ inverted repeat elements (IRs) and msr required for priming of reverse transcription, along with the msd stem loop. Region of the msd stem loop that was replaced with an engineered sequence is indicated.

[0061] FIG. 46 depicts secondary structure predictions of retron ncRNAs from the MG155 family, highlighting the 5′ and 3′ inverted repeat elements (IRs) and msr required for priming of reverse transcription, along with the msd stem loop. Region of the msd stem loop that was replaced with an engineered sequence is indicated.

[0062] FIG. 47 depicts secondary structure predictions of retron ncRNAs from the MG156 family, highlighting the 5′ and 3′ inverted repeat elements (IRs) and msr required for priming of reverse transcription, along with the msd stem loop. Region of the msd stem loop that was replaced with an engineered sequence is indicated.

[0063] FIG. 48 depicts secondary structure predictions of retron ncRNAs from the MG157 family, highlighting the 5′ and 3′ inverted repeat elements (IRs) and msr required for priming of reverse transcription, along with the msd stem loop. Region of the msd stem loop that was replaced with an engineered sequence is indicated.

[0064] FIG. 49 depicts secondary structure predictions of retron ncRNAs from the MG158 family, highlighting the 5′ and 3′ inverted repeat elements (IRs) and msr required for priming of reverse transcription, along with the msd stem loop. Region of the msd stem loop that was replaced with an engineered sequence is indicated.

[0065] FIG. 50 depicts secondary structure predictions of retron ncRNAs from the MG159 family, highlighting the 5′ and 3′ inverted repeat elements (IRs) and msr required for priming of reverse transcription, along with the msd stem loop. Region of the msd stem loop that was replaced with an engineered sequence is indicated.

[0066] FIG. 51 depicts secondary structure predictions of retron ncRNAs from the MG173 family, highlighting the 5′ and 3′ inverted repeat elements (IRs) and msr required for priming of reverse transcription, along with the msd stem loop. Region of the msd stem loop that was replaced with an engineered sequence is indicated.

[0067] FIG. 52 depicts the detection of msdDNA production by qPCR. Ec86 is a positive control retron RT, and the corresponding ncRNA tested contained the ˜200nt insertion sequence at the replaceable position version 1 described previously. The ncRNAs for which activity was identified using the corresponding retron RT are colored in black (msdDNA production>10× above the no RT control). The ncRNAs for which activity was not identified using the corresponding retron RT are colored in light grey.

[0068] FIGS. 53A-53D depict editing percentage of a 5nt change on AAVS1 target using MG RTs and MG71-2(H883A). RTs were tested either in an untethered or tethered format (RT on C-term of MG71-2(H883A) indicated by nickase-RT and RT on N-term of MG71-2(H883A) indicated by RT-nickase). FIG. 53A: MMLV2-RT was tested untethered and tethered to MG71-2(H883A) with the highest levels of editing for untethered at PBS 13, nickase-RT PBS 16, and RT-nickase PBS 13. FIG. 53B: Engineered MG151-98 (K297P, Δ166AA) was tested untethered and tethered to MG71-2(H883A) with the highest levels of editing for untethered, nickase-RT, and RT-nickase at PBS 13 with the highest level of editing seen in the RT-nickase configuration. FIG. 53C: MG160-4(H1230R) was only tested in a tethered format with the highest levels of editing for nickase-RT at PBS 10 and RT-nickase at PBS 13. The highest level of editing was seen for the RT-nickase configuration. FIG. 53D: MG160-473 was tested in a tethered format with the highest level of editing for the RT-nickase configuration at PBS 13. The nickase-RT configuration for MG160-473 had low read count through NGS processing and percent editing was not determined. Correct edit indicates the intended correction with no errors found in the NGS amplicon. Incorrect edit refers to the intended edit being incorporated but also includes errors within the NGS amplicon and scaffold incorporation of the pegRNA.

[0069] FIGS. 54A-54S depict the editing percentage for G-to-T transversion of MG retron family candidates untethered to spCas9(H840A). FIG. 54A depicts a summary of untethered MG retron candidates from MG173 family and MG192 family percent editing for G-to-T transversion across eight different PBS lengths of 2, 4, 6, 8, 10, 13, 16, and 20 nucleotides. The MG173-8 candidate showed the highest levels of editing compared to the nine other retron candidates. Editing levels represented in FIGS. 54B-54J labeled “correct edit” represent the intended edit with no mistakes in the NGS amplicon, and bars labeled “incorrect edit” refer to the intended edit being incorporated and includes errors within the NGS amplicon, either originating in misincorporation by the RT and/or scaffold incorporation of the pegRNA. Editing levels represented in FIGS. 54K-54S show editing levels across eight different PBS lengths wherein bars labeled “editing” represent intended edit with errors in the NGS amplicon (excluding pegRNA scaffold incorporation) and bars labeled “scaffold incorporation” represent the intended edit and scaffold incorporation of the pegRNA.

[0070] FIGS. 55A-55AS depict the editing percentage for G-to-T transversion of MG160 family candidates tethered to spCas9(H840A). FIG. 55A depicts a summary of tethered MG160 candidates percent editing for G-to-T transversion across eight different PBS lengths of 2, 4, 6, 8, 10, 13, 16, and 20 nucleotides. MG160-45, MG160-121, MG160-136, MG160-193, MG160-232, and MG160-358 showed editing levels reaching 5% or higher at varying PBS lengths. Editing levels represented in FIGS. 55B-55W show editing levels across eight different PBS lengths. Bars labeled “correct edit” represent the intended edit with no mistakes in the NGS amplicon, and bars labeled “incorrect edit” refer to the intended edit being incorporated and includes errors within the NGS amplicon, either originating in misincorporation by the RT and/or scaffold incorporation of the pegRNA. Editing levels represented in FIGS. 55X-55AS show editing levels across eight different PBS wherein bars labeled “editing” represent the intended edit with errors in the NGS amplicon (excluding pegRNA scaffold incorporation) and bars labeled “scaffold incorporation” represent the intended edit and scaffold incorporation of the pegRNA.

[0071] FIGS. 56A-56F depict the percent editing for diverse edits with MG151-98 mutants untethered to spCas9(H840A) for a VEGFA target. MG151-98 wild-type and mutants MG151-98 (D166AA,H171N) and MG151-98(D166AA,K297P) were evaluated for correction of G-to-T transversion (FIGS. 56A and 56D), 24 nucleotide insertion (FIGS. 56B and 56E), and 15 nucleotide deletion (FIGS. 56C and 56F) on the VEGFA target with pegRNAs having varying PBS lengths of 6, 8, 10, and 13 nucleotides. FIGS. 56A-56C: Bars labeled “correct edit” represent the intended edit with no mistakes in the NGS amplicon, and bars labeled “incorrect edit” refer to the intended edit being incorporated and includes errors within the NGS amplicon, either originating in misincorporation by the RT and/or scaffold incorporation of the pegRNA. Controls MMLV1 and MMLV2 represent untethered spCas9(H840A), pegRNA at PBS 13, and RT plasmid encoding MMLV1 or MMLV2, respectively. Editing levels represented in FIGS. 56D-56F show editing levels across four different PBS lengths wherein bars labeled “editing” represent the intended edit with errors in the NGS amplicon (excluding pegRNA scaffold incorporation) and bars labeled “scaffold incorporation” represent the intended edit and scaffold incorporation of the pegRNA. Controls MMLV1 and MMLV2 represent untethered spCas9(H840A), pegRNA at PBS 13, and RT plasmid encoding MMLV1 or MMLV2, respectively.

[0072] FIGS. 57A-57H depict the percent editing for G-to-T transversion of MG151 family mutants and MG153 family mutants untethered to spCas9(H840A). Percent editing for G-to-T transversion on the VEGFA target with pegRNAs having varying PBS lengths of 6, 8, 10, and 13 nucleotides was evaluated for MG151-123 wild type and mutants (M304R, H287F, H178R, H178N, G279R, or G279N) (FIGS. 57A and 57E), MG151-126 wild type and mutants (H287F, G179R, G179N, A280R, A280K, or A276R) (FIGS. 57B and 57F), MG153-18 wild type and mutants (G119R, P242R, or double mutant G119R and P242R) (FIGS. 57C and 57G), and MG153-20 wild type and mutants (N55R, P226R, or double mutant N55R and P226R) (FIGS. 57D and 57H). FIGS. 57A-57D: Bars labeled “correct edit” represent the intended edit with no mistakes in the NGS amplicon, and bars labeled “incorrect edit” refer to the intended edit being incorporated and includes errors within the NGS amplicon, either originating in misincorporation by the RT and/or scaffold incorporation of the pegRNA. Editing levels represented in FIGS. 57E-57H show percent editing levels across four different PBS lengths wherein bars labeled “editing” represent the intended edit with errors in the NGS amplicon (excluding pegRNA scaffold incorporation) and bars labeled “scaffold incorporation” represent the intended edit and scaffold incorporation of the pegRNA. Controls including “no RT” represents untethered spCas9(H840A) with pegRNA at PBS 13 and MMLV1 and MMLV2 represent untethered spCas9(H840A), pegRNA at PBS 13, and RT plasmid encoding MMLV1 or MMLV2, respectively.

[0073] FIGS. 58A-58L depict the percent editing for diverse edits with MG160-473 mutants tethered to spCas9(H840A) for VEGFA target. MG160-473 wild type and mutants MG160-473(F231K) and MG160-473(F231R) were evaluated for correction of G-to-T transversion (FIGS. 58A, 58D, 58G, and 58J), 24 nucleotide insertion (FIGS. 58B, 58E, 58H, and 58K), and 15 nucleotide deletion (FIGS. 58C, 58F, 58I, and 58L) on the VEGFA target with pegRNAs having varying PBS lengths of 6, 8, 10, 13, and 16 nucleotides. FIGS. 58A-C and 58G-I: Bars labeled “correct edit” represent the intended edit with no mistakes in the NGS amplicon, and bars labeled “incorrect edit” refer to the intended edit being incorporated and includes errors within the NGS amplicon, either originating in misincorporation by the RT and/or scaffold incorporation of the pegRNA. Editing levels represented in FIGS. 58D-58F and 58J-L show percent editing levels across different PBS lengths wherein bars labeled “editing” representing the intended edit with errors in the NGS amplicon (excluding pegRNA scaffold incorporation) and bars labeled “scaffold incorporation” represent the intended edit and scaffold incorporation of the pegRNA. Controls including “untreated” represents cells with no treatment during transfection and cas-PE1 and cas-PE2 represent tethered spCas9(H840A) to MMLV1 or MMLV2 using pegRNA at PBS 13, respectively. Asterisks indicates NGS sample had less than 1000 reads.

[0074] FIGS. 59A-59P depict the percent editing of five nucleotide change on AAVS1 target with tethered MG reverse transcriptase and MG71-2n. The reverse transcriptase was tested either untethered to MG71-2n, tethered to the C-terminus of MG71-2n (nickase-RT), or tethered to the N-terminus of MG71-2n (RT-nickase) across six different PBS lengths (6, 8, 10, 13, 16, or 20 nucleotides) targeting a five nucleotide change on AAVS1 target. Reverse transcriptases tested for this correction include: MMLV1 (FIGS. 59A and 59D), MMLV2 (FIGS. 59B and 59E), MG160-4 (FIGS. 59C and 59F), MG151-98 (D166AA) (FIGS. 59G and 59J), MG151-98 (D166AA, H171N) (FIGS. 59H and 59K), MG151-98(D166AA, K297P) (FIGS. 59I and 59L), MG160-4(H230R) (FIGS. 59M and 59O), and MG160-473 (FIGS. 59N and 59P). Bars labeled “correct edit” represent the intended edit with no mistakes in the NGS amplicon and bars labeled “incorrect edit” refer to the intended edit being incorporated and includes errors within the NGS amplicon, either originating in misincorporation by the RT and/or scaffold incorporation of the pegRNA. Bars labeled “editing” represent the intended edit with errors in the NGS amplicon (excluding pegRNA scaffold incorporation) and bars labeled “scaffold incorporation” represent the intended edit and scaffold incorporation of the pegRNA. Low read count indicates NGS sample had less than 1000 reads.

[0075] FIGS. 60A-60H depict the percent editing of diverse edits on AAVS1 target with MG reverse transcriptases tethered to the N-terminus of MG71-2n. Reverse transcriptase MMLV1, MMLV2, MG160-4 wild type, or MG160-4 (H230R) was tethered by a 32 amino acid linker to the N-terminus of MG71-2n and challenged to either a G-to-T transversion (FIGS. 60A and 60E), a 24 nucleotide insertion (FIGS. 60B and 60F), a 15 nucleotide deletion (FIGS. 60C and 60G), or a five nucleotide change (FIGS. 60D and 60H) on the AAVS1 target using pegRNAs with PBS lengths of 8, 10, 13, and 16 nucleotides. MG160 candidates were also tested untethered (UT) to MG71-2n with a pegRNA at a PBS length of 13 nucleotides. FIGS. 60A-60D: Bars labeled “correct edit” represent the intended edit with no mistakes in the NGS amplicon and bars labeled “incorrect edit” refer to the intended edit being incorporated and includes errors within the NGS amplicon, either originating in misincorporation by the RT and/or scaffold incorporation of the pegRNA. Editing levels represented in FIGS. 60E-60H show percent editing levels across four different PBS lengths wherein bars labeled “editing” represent the intended edit with errors in the NGS amplicon (excluding pegRNA scaffold incorporation) and bars labeled “scaffold incorporation” represent the intended edit and scaffold incorporation of the pegRNA. Asterisks indicates NGS sample had less than 1000 reads.

[0076] FIGS. 61A-61L depict the percent editing of diverse edits on AAVS1 target with MG151-98 mutants untethered to MG71-2n. Reverse transcriptases MMLV1, MMLV2, MG151-98 (D166AA, H171N), MG151-98 (D166AA, K297P), MG151-98 (D166AA, H171N, K297P), and untethered MG71-2n were challenged to either a G-to-T transversion (FIGS. 61A and 61E), a 24 nucleotide insertion (FIGS. 61B and 61F), a 15 nucleotide deletion (FIGS. 61C and 61G), or a five nucleotide change (FIGS. 61D and 61H) on the AAVS1 target using pegRNAs with PBS lengths of 8, 10, 13, and 16 nucleotides. FIGS. 61A-61D: Bars labeled “correct edit” represent the intended edit with no mistakes in the NGS amplicon, and bars labeled “incorrect edit” refer to the intended edit being incorporated and includes errors within the NGS amplicon, either originating in misincorporation by the RT and/or scaffold incorporation of the pegRNA. Editing levels represented in FIGS. 61E-61H show percent editing levels across four different PBS lengths wherein bars labeled “editing” represent the intended edit with errors in the NGS amplicon (excluding pegRNA scaffold incorporation) and bars labeled “scaffold incorporation” represent the intended edit and scaffold incorporation of the pegRNA. FIGS. 61I-61K depict editing levels for each specific correction across four different PBS lengths (8, 10, 13, and 16 nucleotides) for each reverse transcriptase with line representing average median percent editing.

[0077] FIGS. 62A-62B depict modifications to the MG71-2 scaffold resulting in improved five nucleotide change editing percentage on AAVS1 target. The scaffold for MG71-2 contains 107 nucleotides, and two modified versions of the scaffold, D2 or D2C2, resulted in a shortened scaffold length of 85 nucleotides and 79 nucleotides, respectively. The D2 scaffold removed the last hairpin of the MG71-2 scaffold, and the D2C2 scaffold removed the last hairpin in combination with a small bulge of the MG71-2 scaffold. Editing levels for a five nucleotide change on the AAVS1 target were tested on the wild type and modified scaffold across PBS lengths of 8, 10, 13, and 16 nucleotides with reverse transcriptase MMLV2 or MG160-4 (H230R) tethered to the N-terminus of MG71-2n. FIG. 62A: Bars labeled “correct edit” represent the intended edit with no mistakes in the NGS amplicon and bars labeled “incorrect edit” refer to the intended edit being incorporated and includes errors within the NGS amplicon, either originating in misincorporation by the RT and/or scaffold incorporation of the pegRNA. Editing levels represented in FIG. 62B show percent editing levels across eight different PBS lengths wherein bars labeled “editing” represent intended edit with errors in the NGS amplicon (excluding pegRNA scaffold incorporation) and bars labeled “scaffold incorporation” represent intended edit and scaffold incorporation of the pegRNA.

[0078] FIGS. 63A-63H depict guide RNA optimization to improve editing levels for MG71-2n. FIGS. 63A-63D show reverse transcriptases MMLV1, MMLV2, MG151-98 (D166AA, H171N), MG151-98 (D166AA, K297P), MG151-98 (D166AA, H171N, K297P) and untethered MG71-2n challenged to a five nucleotide change on the AAVS1 target. FIGS. 63E-63H show reverse transcriptases MMLV1, MMLV2, MG160-4 and MG160-4 (H230R) tethered to the N-terminus of MG71-2n and MG160-4 and MG160-4 (H230R) untethered (UT) to MG71-2n challenged to a five nucleotide change on the AAVS1 target. Varying mismatches in the pegRNA across the PBS region were tested to determine if improvements on editing could be achieved. PBS lengths of 8, 10, 13, and 16 nucleotides in FIGS. 63A, 63C, 63E, and 63G had perfect complementarity to the target region. In FIGS. 63B, 63D, 63F, and 63H, PBS lengths of 10, 13, 16, and 20 nucleotides had perfect complementarity of 8 nucleotides in the region neighboring the reverse transcription template (RTT) and then had varying mismatches (mm) to achieve PBS lengths of 10 (2 mismatches), 13 (5 mismatches), 16 (8 mismatches), and 20 (12 mismatches) nucleotides. Bars labeled “correct edit” represent the intended edit with no mistakes in the NGS amplicon and bars labeled “incorrect edit” refer to the intended edit being incorporated and includes errors within the NGS amplicon, either originating in misincorporation by the RT and/or scaffold incorporation of the pegRNA. Bars labeled “editing” represent the intended edit with errors in the NGS amplicon (excluding pegRNA scaffold incorporation) and bars labeled “scaffold incorporation” represent the intended edit and scaffold incorporation of the pegRNA.

[0079] FIGS. 64A-64E depict guide RNA modifications of MG3-6 to improve editing levels in mammalian cells. FIG. 64A: MG3-6 wild type mRNA was used to determine percent modified (including SNPs and InDels) levels of target amplicon AAVS1 in NGS samples. Guide RNA is composed of the scaffold and spacer for the target and pegRNA includes the guide RNA with PBS and RTT sequence. Modifications modL1-modL4 have increased regions of GC content in hairpins 1 through 3 (modL1-modL3) of the scaffold, with modL4 combining modifications of all hairpins in the scaffold. FIGS. 64B-64C depict percent editing for a two nucleotide change in AAVS1 target measured across PBS lengths of 10 and 13 nucleotides with wild type scaffold and modified scaffolds modL1-modL4 using tethered MMLV2 to C-terminus of MG3-6(H586A). As controls, “untreated” represents cells with no treatment during transfection and MG3-6(H586A) represents nickase and pegRNA with no reverse transcriptase include in transfection of cells. FIGS. 64D-64E depict percent editing for a two nucleotide change in AAVS1 target measured across PBS lengths of 8, 10, 13 and 16 nucleotides with perfect complementarity to target or PBS lengths 10 (2 mismatches), 13 (5 mismatches), 16 (8 mismatches), and 20 (12 mismatches) using untethered MMLV1, MMLV2, MG151-98 (D166AA, H171N), and MG151-98 (D166AA, K297P) with nickase MG3-6(H586A). Bars labeled “correct edit” represent the intended edit with no mistakes in the NGS amplicon and bars labeled “incorrect edit” refer to the intended edit being incorporated and includes errors within the NGS amplicon, either originating in misincorporation by the RT and/or scaffold incorporation of the pegRNA. Bars labeled “editing” represent the intended edit with errors in the NGS amplicon (excluding pegRNA scaffold incorporation) and bars labeled “scaffold incorporation” represent the intended edit and scaffold incorporation of the pegRNA.

[0080] FIGS. 65A-65B depict comparison of MG3-6 and MG3-6/3-8 recognition of target with guide RNAs having varying PBS lengths. MG3-6 wild type and MG3-6/3-8 mRNA was used to determine percent modified (including SNPs and InDels) levels of target amplicon AAVS1 (FIG. 65A) and B2M (FIG. 65B) for guide RNA or pegRNA with PBS lengths of 2, 4, 6, 8, 10, 13, 16, and 20 nucleotides. The guide RNA is composed of the scaffold and spacer for the target and the pegRNA includes the guide RNA with PBS and RTT sequence. MG3-6/3-8 showed higher levels of modifications (including InDels) on target compared to MG3-6. Control “untreated” represents cells with no treatment during transfection.

[0081] FIGS. 66A-66D depict identification of MG14-241 targets for compatibility with prime editing system. FIG. 66A: Wild type MG14-241 mRNA or plasmid was used to determine percent modified (including SNPs and InDels) levels of various targets. Guide RNA for varying targets (G1, H1, B2, E2, F2, and G2) resulted in varying levels of percent modified with target E2 (region of AAVS1) resulted in the highest levels of InDels (reaching about 60%). FIG. 66B: mRNA of MG14-241 was used to determine percent modified (including SNPs and InDels) levels of target amplicon AAVS1 in NGS samples. The guide RNA is composed of the scaffold and spacer for the target and pegRNA includes the guide RNA with PBS and RTT sequence. As PBS length increased, percent modified decreased. Control “untreated” represents cells with no treatment during transfection. FIGS. 66C-66D: Percent editing of five nucleotide change on AAVS1 target across eight different PBS lengths (2, 4, 6, 8, 10, 13, 16, and 20 nucleotides) with untethered reverse transcriptases MMLV1, MMLV2, MG151-98 (D166AA, H171N), and MG151-98 (D166AA, K297P) with nickase MG14-241n. MG14-241n (no RT) represents nickase and pegRNA with no reverse transcriptase included in transfection of cells. Bars labeled “correct edit” represent the intended edit with no mistakes in the NGS amplicon and bars labeled “incorrect edit” refer to the intended edit being incorporated and includes errors within the NGS amplicon, either originating in misincorporation by the RT and/or scaffold incorporation of the pegRNA. Bars labeled “editing” represent the intended edit with errors in the NGS amplicon (excluding pegRNA scaffold incorporation) and bars labeled “scaffold incorporation” represent the intended edit and scaffold incorporation of the pegRNA.

[0082] FIGS. 67A-67D depict the design of an engineered cell line, RT-Cas chimeric proteins, and RNA cargo templates to assess integration by TPRT. FIG. 67A depicts a schematic showing the artificial sequence integrated into HEK293 cells via lentivirus to generate the engineered cell line with target sites for integration. FIG. 67B depicts the percentage of indels generated by five different sgRNAs targeting the engineered landing pad. FIG. 67C depicts a schematic showing four different conformations of each RT-Cas9WT/Nickase fusion generated for testing. FIG. 67D depicts six cargo designs generated for testing integration via TPRT.

[0083] FIG. 68 depicts a schematic representation of primers used for left end and right end PCRs to detect integrations.

[0084] FIGS. 69A-69C depict detection of cargo integration using Cas9 WT-MG140-3 and sg4 using Tapestation at LE (box shows band of interest; FIG. 69A), Sanger sequencing at LE PCR (Sequences matching landing pad and cargo are shown; FIG. 69B). and Sanger sequencing at RE PCR (Sequences showing matches to cargo, but also an insertion of another product (Cas9) is shown; FIG. 69C).

[0085] FIGS. 70A-70B depict detection of cargo integration using MG140-3-Cas9 WT and sg4. Tapestation at LE (FIG. 70A) and Sanger sequencing at LE PCR (FIG. 70B) show matches to landing pad and mCherry cargo.

[0086] FIG. 71 depicts detection of cargo integration using Cas9 WT-MG140-8 and sg4 by Sanger sequencing at LE.

[0087] FIGS. 72A-72B depict detection of cargo integration using MG153-18-CAs9 WT and sg4 by Tapestation at LE (FIG. 72A) and Sanger sequencing at LE (FIG. 72B).

[0088] FIGS. 73A-73C depict Retron RT activity on cognate ncRNAs loaded with 2.2 kb cargo. FIG. 73A depicts a schematic of substrate designs for testing activity and processivity of retron RTs. The generic template was used to test retron non-specific activity and was primed by a ssDNA priming oligo annealed to the 3′ end of the RNA. The retron ncRNA was primed with the 5′ and 3′ inverted repeats (IRs) facilitated by the presence of terminal 5′ and 3′ retron ncRNA elements. For both substrates, the cargo sequence was flanked by the reverse complements (rc) of the LE and RE recognition motifs for MG92-4 TnpA. This sequence was then flanked by ˜100 nt RNA sequences that when converted to cDNA can be quantified by multiplexed TaqMan qPCR to evaluate how much of the 5′ (FAM) and 3′ (HEX) end of the cDNA molecule was synthesized by the RT. For the retron ncRNA substrate, the sequence was inserted within a previously identified replaceable region of the ncRNA msd. FIG. 73B depicts the quantity of ssDNA detected by FAM and HEX by multiplexed TaqMan qPCR. The no RT control was generated by not adding any RT expression template to the cell-free expression system. The dashed line is 10-fold above the highest background no RT signal. TGIRT is a GII intron control RT, MMLV is a retroviral control RT, and Ec86 is a retron contro RT. The label “gen” denotes that the RT was tested with the generic template, while “ncRNA” indicates that the RT was tested with its cognate ncRNA loaded with cargo. FIG. 73C depicts confirmation of 2.2 kb ssDNA generated by RTs by tapestation D5000. Lanes correspond to the following: Lane 1: Ladder; Lane 2: no RT gen; Lane 3: TGIRT gen; Lane 4: MG154-1 nRNA; Lane 5: MG157-1 ncRNA; Lane 6: MG157-3 ncRNA; Lane 7: MG157-4 ncRNA; Lane 8: MG158-1 ncRNA; Lane 9: MG159-3 ncRNA; Lane 10: MG173-1 ncRNA.

[0089] FIGS. 74A-74B depict a screen for the ability of retron RT MG173-1 to synthesize cDNA in mammalian cells. FIG. 74A depicts a cartoon depicting the methodology used to detect cDNA synthesis in mammalian cells. The first (FAM) and last (HEX) 100 bps of a 4.1 kb RNA template are detected using Taqman based qPCR. FIG. 74B depicts Taqman qPCR detection of first (FAM probe) and last (HEX probe) 100 bp per products amplified from cDNA synthesized from a generic 4 kb template, a generic 2 kb template, and an MG173-1 specific template flanked by 5′ and 3′ terminal MG173-1 ncRNA elements.

[0090] FIGS. 75A-75B depict the insertion reaction and Sanger sequencing for PCR of TnpA 92-4 with 2.2 kb retron-produced cDNA cargo. FIG. 75A: Lane 1: PCR of no template control (NTC) insertion reaction with a ssDNA ultramer target and MG173-1 produced cDNA cargo. Lane 2: PCR of TnpA 92-4 insertion reaction with a ssDNA ultramer target and MG173-1 produced cDNA cargo. FIG. 75B: Sanger sequencing of chimeric insertion product generated by TnpA 92-4 mediated insertion of MG173-1 produced cargo into a ssDNA ultramer target. FIG. 75B discloses SEQ ID NO: 2579.

[0091] FIGS. 76A-76H depict the targeting of therapeutic sites with MG71-2. FIG. 76A: WT mRNA of MG71-2 having InDels on therapeutically relevant sites (hPDK1, G6PC1 Q347*, and PAH R408W) with various guide RNAs. Highest InDels seen are at guide 1 for hPDK1 gene and guide 2 for PAH gene targeting an R408W mutation. Other guides tested for G6PC1 had no InDel detection with these guides. The positive control contained a guide RNA targeting AAVS1. FIG. 76B: Targeting HBB gene mutation E7V with guide RNA and pegRNAs with varying PBS lengths of 8, 10, and 13 nucleotides. InDels slightly decrease with pegRNA compared to guide RNA. Editing levels across eight different PBS lengths are shown. FIGS. 76C-76H: Prime editing experiments were then performed with pegRNAs using the spacers from FIGS. 76A-76B. Prime editing systems were MG160-4(H230R) tethered to the N-term of MG71-2n (MG160-4(H230R)-MG71-2n) and MMLV2 tethered to the N-term of MG71-2n (MMLV2-MG71-2n). FIGS. 76C-76D: MG160-4(H230R)-MG71-2n and MMLV2-MG71-2n targeted disruption of a microRNA recognition site by using pegRNAs that contained 3 or 5 nucleotide (nt) mismatches incorporated into the RT template (RTT) of the pegRNA. Highest levels of editing were seen at PBS 10 for a 3nt mismatch incorporation into the hPDK1 microRNA recognition site. FIGS. 76E-76F: Prime editing systems targeting PAH R408W across PBS lengths 8, 10, and 13 nt with RTT varying in length of 29nt and 32nt showed no detectable levels of editing. FIGS. 76G-76H: MG160-4(H230R)-MG71-2n and MMLV2-MG71-2n targeted HBB E7V mutation across multiple PBS lengths and achieved above background level of editing. Bars labeled “correct edit” represent the intended edit with no mistakes in the NGS amplicon and bars labeled “incorrect edit” refer to intended edit being incorporated and includes errors within the NGS amplicon, either originating in misincorporation by the RT and/or scaffold incorporation of the pegRNA. Bars labeled “editing” represent the intended edit with errors in the NGS amplicon (excluding pegRNA scaffold incorporation) and bars labeled “scaffold incorporation” represent the intended edit and scaffold incorporation of the pegRNA. * indicates less than 1000 reads were obtained for that NGS sample, and error bars represent the standard deviation of two biological replicates.

[0092] FIGS. 77A-77D depict data demonstrating that MG71-2 recognizes multiple guide RNAs across various targets allowing for the incorporation of larger genomic changes. FIG. 77A: WT mRNA of MG71-2 having InDels on two targets (TRAC and AAVS1) with various guide RNAs. Target sites, D3 and D4, on AAVS1 showed some of the highest levels of editing and had a distance of 69nt apart on the AAVS1 target. Spacers for D3 and D4 were oriented in the correct orientation to be compatible for TWIN, PASTE, and template jumping (Tj) prime editing methods. FIG. 77B: Tape station gel image for confirming replacement of a 69nt sequence in the AAVS1 target with a 38nt Bxb1 sequence using a Bxb1 specific primer. Lanes G3 and H3 are two replicates for MMLV2-MG71-2n using pegRNA containing the Bxb1 sequence and a nicking guide (PASTE method), while lanes A4 and B4 represent two replicates for MMLV2-MG71-2n using pegRNA containing the Bxb1 sequence and no nicking guide. Lanes C4 and D4 are samples from MG151-98(H171N, K297P, 166AA)-MG71-2n using pegRNA containing the Bxb1 sequence and no nicking guide, while lanes E4 and D4 used pegRNA containing the Bxb1 sequence and a nicking guide (PASTE method). FIGS. 77C-77D: Tape station fragment analysis for lanes G3, H3, E4, and F4 confirming amplicon containing Bxb1 sequence.

[0093] FIGS. 78A-78L depict optimization of MG71-2n system with selected reverse transcriptases. FIGS. 78A-78D: MG160-4(H230R) was either cloned on the N- or C-terminus of MG71-2n with a 33 amino acid linker. In addition, MG160-4(H230R) and MG71-2n was inlaid at five different insertion sites (S311, S355, T396, I822, and V1176). Inlaid constructs had a 33 amino acid linker on the 5′ and 3′ end of MG160-4(H230R) at the insertion site. Inlaid constructs were tested for a 5nt change and a 24nt insertion on AAVS1 target across four different PBS lengths. MG160-4(H230R) on N-terminus of MG71-2n showed highest levels of editing. FIGS. 78E-78H: Various linker lengths (14AA, 15AA, 26AA, and 32AA) fusing MG160-4 to the N-terminus of MG71-2 were tested alongside the original 33AA linker. The 32AA and 33AA linker had similar levels of editing for both a 5nt change and a 24nt insertion on AAVS1 target. FIGS. 78I-78L: Various linker lengths (7AA, 14AA, 15AA, 16AA, 26AA, 32AA 44AA, and 58AA) fusing RT MG160-473 or MG151-98 (H171N, Δ166AA) to the N-terminus of MG71-2 were tested alongside the original 33AA linker and screened for incorporating a 5nt change and a 24nt insertion on AAVS1 target. Bars labeled “correct edit” represent the intended edit with no mistakes in the NGS amplicon and bars labeled “incorrect edit” refer to the intended edit being incorporated and includes errors within the NGS amplicon, either originating in misincorporation by the RT and/or scaffold incorporation of the pegRNA. Bars labeled “editing” represent the intended edit with errors in the NGS amplicon (excluding pegRNA scaffold incorporation) and bars labeled “scaffold incorporation” represent the intended edit and scaffold incorporation of the pegRNA.

[0094] FIGS. 79A-79O depict the targeting of therapeutic sites with MG3-6-3-8 and MG3-6. FIG. 79A: WT mRNA of MG3-6/3-8 having InDels on therapeutically relevant sites (A1AT, PAH R408W, G6PC1 Q347*, G6PC1 R83C, and hPDK1) with various guide RNAs. Guide RNAs represented with the dark grey bar indicates the chosen spacer sequence for designing pegRNAs. FIGS. 79B-79K: Prime editing systems MG160-4(H230R) tethered to the C-term of MG3-6-3-8n (MG3-6-3-8n-MG160-4(H230R) and MMLV2 tethered to the C-term of MG3-6-3-8n (MG3-6-3-8n-MMLV2-) were tested for prime editing at therapeutically relevant sites. No editing was detected at sites PAH R408W, G6PCI: R83C, and hPDK1. Some detectable levels of editing were seen for A1AT and G6PC1 Q347*. FIGS. 79L-79O: MG160-4(H230R) tethered to the N-terminus of MG3-6n or MG3-6-3-8n was compared to editing with MMLV2 tethered to the C-terminus of MG3-6n or MG3-6-3-8n. These constructs targeted four therapeutic sites A1A and hPDK1. Bars labeled “correct edit” represent the intended edit with no mistakes in the NGS amplicon and bars labeled “incorrect edit” refer to the intended edit being incorporated and includes errors within the NGS amplicon, either originating in misincorporation by the RT and/or scaffold incorporation of the pegRNA. Bars labeled “editing” represent the intended edit with errors in the NGS amplicon (excluding pegRNA scaffold incorporation) and bars labeled “scaffold incorporation” represent the intended edit and scaffold incorporation of the pegRNA. * indicates less than 1000 reads were obtained for that NGS sample.

[0095] FIGS. 80A-80D depict optimization of MG3-6n system with MG160-4 and MG160-4(H230R). FIGS. 80A-80B: MG160-4 was cloned to the N terminus of MG3-6n with various linker lengths of 33AA (the original linker length) as well as 32AA, 44AA, and 58AA. These prime editing systems were then tested to correct two STOP codons in a linker between hygromycin and BFP engineered cell line. pegRNAs with PBS lengths of 8, 10, and 13 nucleotides were tested. Using pegRNA with a PBS length of 8nt showed highest levels of editing using a fusion construct having a 58AA. As PBS length got longer, the difference between the linker systems showed less variability in editing levels when using prime editing systems with different linker lengths. FIGS. 80C-80D: In addition, MG160-4(H230R) and MG3-6n was inlaid at five different insertion sites (K115, V208, K368, D550, and L881). Inlaid constructs had a 33 amino acid linker on the 5′ and 3′ end of MG160-4(H230R) at the insertion site. Inlaid constructs were tested for correction of two STOP codons in a linker between hygromycin and BFP engineered cell line across three different PBS lengths. Highest levels of editing were seen when MG160-4(H230R) was tethered to the N-terminus of MG3-6n. Bars labeled “correct edit” represent the intended edit with no mistakes in the NGS amplicon and bars labeled “incorrect edit” refer to the intended edit being incorporated and includes errors within the NGS amplicon, either originating in misincorporation by the RT and/or scaffold incorporation of the pegRNA. Bars labeled “editing” represent the intended edit with errors in the NGS amplicon (excluding pegRNA scaffold incorporation) and bars labeled “scaffold incorporation” represent the intended edit and scaffold incorporation of the pegRNA.

[0096] FIGS. 81A-81C depict a screen of natural reverse transcriptases tethered to N-terminus of MG71-2n targeting AAVS1. FIG. 81A: Summary of MG198 candidates tethered to the N-terminus of MG71-2n targeting a 5nt change in AAVS1 using pegRNAs at varying PBS lengths (8, 10, 13, and 16nt). Editing levels above background were seen for candidates MG198-6 and MG198-7. FIGS. 81B-81C: MG160 candidates MG160-45, MG160-121, MG160-136, and MG160-232 were tethered to the N-terminus of MG71-2n targeting a 5nt change in AAVS1 using pegRNAs at varying PBS lengths (8, 10, 13nt). All MG160 candidates were slightly above background levels but showed poor activity compared to MG160-4(H230R) and MMLV2 tethered to the N-terminus of MG71-2n. Bars labeled “correct edit” represent the intended edit with no mistakes in the NGS amplicon and bars labeled “incorrect edit” refer to the intended edit being incorporated and includes errors within the NGS amplicon, either originating in misincorporation by the RT and/or scaffold incorporation of the pegRNA. Bars labeled “editing” represent the intended edit with errors in the NGS amplicon (excluding pegRNA scaffold incorporation) and bars labeled “scaffold incorporation” represent the intended edit and scaffold incorporation of the pegRNA. * indicates less than 1000 reads were obtained for that NGS sample

[0097] FIGS. 82A-82I depict a screen of MG160 ASR candidates tethered to N-terminus of MG71-2n for versatile edits on AAVS1 target. FIG. 82A: Summary of MG160 ASR candidates tethered to the N-terminus of MG71-2n targeting a 5nt change in AAVS1 using pegRNAs at varying PBS lengths (8, 10, 13, and 16nt). Editing levels above background were seen for candidates MG160-491, MG160-492, and MG160-493. FIGS. 82B-82C: MG160-491, MG160-492, and MG160-493 were then compared to wild type MG160-4, MG160-4(H230R), MMLV2, and EC86 for a 5nt change on AAVS1. All candidates were comparable to MG160-4(H230R). MG160-491, MG160-492, and MG160-493 were then tested for a G-to-T transvehrsion (FIGS. 82D and 82G), a 24nt insertion (FIGS. 82E and 82H), and a 15nt deletion (FIGS. 82F and 82I). Bars labeled “correct edit” represent the intended edit with no mistakes in the NGS amplicon and bars labeled “incorrect edit” refer to the intended edit being incorporated and includes errors within the NGS amplicon, either originating in misincorporation by the RT and/or scaffold incorporation of the pegRNA. Bars labeled “editing” represent the intended edit with errors in the NGS amplicon (excluding pegRNA scaffold incorporation) and bars labeled “scaffold incorporation” represent the intended edit and scaffold incorporation of the pegRNA. * indicates less than 1000 reads were obtained for that NGS sample.

[0098] FIGS. 83A-83D depict the impact of nicking guides on prime editing efficiency. FIGS. 83A-83B: Summary of prime editing efficiency with a panel of nicking guides in K562 cells with MG160-4 H230R-MG71-2n. Bars labeled “correct edit” represent the intended edit with no mistakes in the NGS amplicon and bars labeled “incorrect edit” refer to the intended edit being incorporated and includes errors within the NGS amplicon, either originating in misincorporation by the RT and/or scaffold incorporation of the pegRNA. Bars labeled “editing” represent the intended edit with errors in the NGS amplicon (excluding pegRNA scaffold incorporation) and bars labeled “scaffold incorporation” represent the intended edit and scaffold incorporation of the pegRNA. FIGS. 83C-83D: Summary of prime editing efficiency with a panel of nicking guides in K562 cells with MMLV2-MG71-2n. No nick bar indicates baseline editing with 5nt change guide, no guide indicated background editing in mRNA-only samples.

[0099] FIGS. 84A-84D depict the impact of nicking guides on prime editing efficiency in K562 and HEK293T cells. FIGS. 84A-84B: Summary of prime editing efficiency with nicking guides A2-H2 and A6-H6 from FIG. 78 in K562 cells with MG160-4 H230R-MG71-2n, MMLV2-MG71-2n and MG151-98-DM-SL1-MG71-2n. No nick bar indicates baseline editing with 5nt change guide, no guide indicates background editing in mRNA-only samples. Bars labeled “correct edit” represent the intended edit with no mistakes in the NGS amplicon and bars labeled “incorrect edit” refer to the intended edit being incorporated and includes errors within the NGS amplicon, either originating in misincorporation by the RT and/or scaffold incorporation of the pegRNA. Bars labeled “editing” represent the intended edit with errors in the NGS amplicon (excluding pegRNA scaffold incorporation) and bars labeled “scaffold incorporation” represent the intended edit and scaffold incorporation of the pegRNA. FIGS. 84C-84D: Summary of prime editing efficiency with nicking guides A2-H2 and A6-H6 from FIG. 78 in HEK293T cells with MG160-4 H230R-MG71-2n, MMLV2-MG71-2n, and MG151-98-DM-SL1-MG71-2n. No nick bar indicates baseline editing with 5nt change guide, no guide indicates background editing in mRNA-only samples.

[0100] FIGS. 85A-85B depict the impact of nicking guides on prime editing efficiency in K562 cells. FIGS. 85A-85B: Summary of prime editing efficiency with nicking guides A2-H2, A5-H5 and A6-H6 from FIG. 78 in K562 cells with MG160-4 H230R-MG71-2n, MMLV2-MG71-2n, and MG151-98-DM-SL1-MG71-2n. pegRNAs with PBS lengths 8, 10, 13, and 16 encoding for a single nucleotide G to T change at AAVS1 were used in these experiments. No nick bars indicate baseline editing with pegRNAs with the indicated PBS length, no guide indicates background editing in mRNA-only samples. Bars labeled “correct edit” represent the intended edit with no mistakes in the NGS amplicon and bars labeled “incorrect edit” refer to the intended edit being incorporated and includes errors within the NGS amplicon, either originating in misincorporation by the RT and/or scaffold incorporation of the pegRNA. Bars labeled “editing” represent the intended edit with errors in the NGS amplicon (excluding pegRNA scaffold incorporation) and bars labeled “scaffold incorporation” represent the intended edit and scaffold incorporation of the pegRNA.

[0101] FIGS. 86A-86B depict the optimization of prime editing efficiency with nicking guides. FIGS. 86A-86B: Summary of prime editing efficiency with nicking guide E6 from FIG. 78 in K562 cells with MG160-4 H230R-MG71-2n. No nick bar indicates baseline editing with 5nt change guide, no guide indicates background editing in mRNA-only samples. Different rations of pegRNA to nicking guides were tested and editing efficiency assessed. Bars labeled “correct edit” represent the intended edit with no mistakes in the NGS amplicon and bars labeled “incorrect edit” refer to the intended edit being incorporated and includes errors within the NGS amplicon, either originating in misincorporation by the RT and/or scaffold incorporation of the pegRNA. Bars labeled “editing” represent the intended edit with errors in the NGS amplicon (excluding pegRNA scaffold incorporation) and bars labeled “scaffold incorporation” represent the intended edit and scaffold incorporation of the pegRNA.

### BRIEF DESCRIPTION OF THE SEQUENCE LISTING

[0102] The Sequence Listing filed herewith provides exemplary polynucleotide and polypeptide sequences for use in methods, compositions, and systems according to the disclosure. Below are exemplary descriptions of sequences therein.

[0103] SEQ ID NOs: 1-37 show the full-length nucleic acid sequences of untethered MG151 family reverse transcriptases suitable for the gene editing systems described herein.

[0104] SEQ ID NOs: 38-61 show the full-length nucleic acid sequences of untethered MG153 family reverse transcriptases suitable for the gene editing systems described herein.

[0105] SEQ ID NOs: 62-68 show the full-length nucleic acid sequences of untethered MG160 family reverse transcriptases suitable for the gene editing systems described herein.

[0106] SEQ ID NOs: 69-75 show the full-length nucleic acid sequences of tethered MG160 family reverse transcriptases suitable for the gene editing systems described herein.

[0107] SEQ ID NOs: 76-83 show the RNA sequences of chemically modified guide RNAs with a single point mutation (VEGFA spacer G to T) with PBS of different lengths suitable for the gene editing systems described herein.

[0108] SEQ ID NOs: 84-91 show the RNA sequences of chemically modified guide RNAs with a single deletion (VEGFA spacer deletion change) with PBS of different lengths suitable for the gene editing systems described herein.

[0109] SEQ ID NOs: 92-99 show the RNA sequences of chemically modified guide RNAs with a single insertion (VEGFA spacer single insertion) with PBS of different lengths suitable for the gene editing systems described herein.

[0110] SEQ ID NOs: 100-101 show the sequences of primers suitable for conducting site-directed editing in the VEGFA site.

[0111] SEQ ID NO: 102 shows the nucleic acid sequence of the VEGFA target site.

[0112] SEQ ID NO: 103 shows the nucleic acid sequence of an exemplary RT-nickase linker.

[0113] SEQ ID NO: 104 shows the nucleic acid sequence of an MG3 effector nuclease suitable for the gene editing systems described herein.

[0114] SEQ ID NOs: 105-108 show the nucleic acid sequences of the endogenous targets AAVS1, B2M, CD5, and CD38.

[0115] SEQ ID NOs: 109-140 show the RNA sequences of chemically modified guide RNAs with spacers targeting AAVS1, B2M, CD5, and CD38 with PBS of different lengths suitable for the gene editing systems described herein.

[0116] SEQ ID NOs: 141-148 show the sequences of primers suitable for conducting site-directed editing in the AAVS1, B2M, CD5, and CD38 sites.

[0117] SEQ ID NO: 149 shows the RNA sequence of a chemically modified guide RNA with a spacer targeting VEGFA.

[0118] SEQ ID NOs: 150-151 and 2580-2581 show the sequences of two retrotransposition assay reporters.

[0119] SEQ ID NOs: 152-154 show the amino acid sequences of MG3-6 nucleases (nMG3-6 D13A, nMG3-6 H586A, and nMG3-6 N609A).

[0120] SEQ ID NOs: 155-160 show the amino acid sequences of exemplary RT-nickase linkers.

[0121] SEQ ID NOs: 161-291 show the amino acid sequences of MG140 family retrotransposition proteins suitable for the gene editing systems described herein.

[0122] SEQ ID NOs: 292-293 show the amino acid sequences of MG146 family retrotransposition proteins suitable for the gene editing systems described herein.

[0123] SEQ ID NOs: 294-317 show the amino acid sequences of MG148 family reverse transcriptase proteins suitable for the gene editing systems described herein.

[0124] SEQ ID NOs: 318-330 show the amino acid sequences of MG149 family reverse transcriptase proteins suitable for the gene editing systems described herein.

[0125] SEQ ID NOs: 331-445 show the amino acid sequences of MG151 family reverse transcriptase proteins suitable for the gene editing systems described herein.

[0126] SEQ ID NOs: 446-499 show the amino acid sequences of MG153 family reverse transcriptases proteins suitable for the gene editing systems described herein.

[0127] SEQ ID NOs: 500-501 show the amino acid sequences of MG154 family reverse transcriptase proteins suitable for the gene editing systems described herein.

[0128] SEQ ID NOs: 502-506 show the amino acid sequences of MG155 family reverse transcriptase proteins suitable for the gene editing systems described herein.

[0129] SEQ ID NOs: 507-508 show the amino acid sequences of MG156 family reverse transcriptase proteins suitable for the gene editing systems described herein.

[0130] SEQ ID NOs: 509-513 show the amino acid sequences of MG157 family reverse transcriptase proteins suitable for the gene editing systems described herein.

[0131] SEQ ID NO: 514 shows the amino acid sequences of MG158 family reverse transcriptase proteins suitable for the gene editing systems described herein.

[0132] SEQ ID NOs: 515-517 show the amino acid sequences of MG159 family reverse transcriptase proteins suitable for the gene editing systems described herein.

[0133] SEQ ID NOs: 518-566 show the amino acid sequences of MG160 family reverse transcriptase proteins suitable for the gene editing systems described herein.

[0134] SEQ ID NOs: 567-571 show the amino acid sequences of MG163 family reverse transcriptase proteins suitable for the gene editing systems described herein.

[0135] SEQ ID NOs: 572-576 show the amino acid sequences of MG164 family reverse transcriptase proteins suitable for the gene editing systems described herein.

[0136] SEQ ID NOs: 577-585 show the amino acid sequences of MG165 family reverse transcriptase proteins suitable for the gene editing systems described herein.

[0137] SEQ ID NOs: 586-590 show the amino acid sequences of MG166 family reverse transcriptase proteins suitable for the gene editing systems described herein.

[0138] SEQ ID NOs: 591-595 show the amino acid sequences of MG167 family reverse transcriptase proteins suitable for the gene editing systems described herein.

[0139] SEQ ID NOs: 596-600 show the amino acid sequences of MG168 family reverse transcriptase proteins suitable for the gene editing systems described herein.

[0140] SEQ ID NOs: 601-611 show the amino acid sequences of MG169 family reverse transcriptase proteins suitable for the gene editing systems described herein.

[0141] SEQ ID NOs: 612-621 show the amino acid sequences of MG170 family reverse transcriptase proteins suitable for the gene editing systems described herein.

[0142] SEQ ID NOs: 622-626 show the amino acid sequences of MG172 family reverse transcriptase proteins suitable for the gene editing systems described herein.

[0143] SEQ ID NOs: 627-628 show the amino acid sequences of MG173 family reverse transcriptase proteins suitable for the gene editing systems described herein.

[0144] SEQ ID NO: 629 shows the amino acid sequence of an MG176 family retrotransposition protein suitable for the gene editing systems described herein.

[0145] SEQ ID NOs: 630-645 show nuclear localization signals (NLS) suitable for the gene editing systems described herein.

[0146] SEQ ID NO: 646 shows the amino acid sequence of an MG3-6 nuclease suitable for the gene editing systems described herein.

[0147] SEQ ID NO: 647 shows the amino acid sequence of an MG29-1 nuclease suitable for the gene editing systems described herein.

[0148] SEQ ID NO: 648 shows the nucleotide sequence of an RNA template for cDNA synthesis.

[0149] SEQ ID NO: 653 shows the nucleotide sequence of MG3-6 (H586A).

[0150] SEQ ID NOs: 654-655 shows the nucleotide sequences of cDNAs encoding gene targets.

[0151] SEQ ID NOs: 656-697 show the full-length peptide sequences of chemically modified guide RNAs.

[0152] SEQ ID NOs: 698-701 show the nucleotide sequences of primers.

[0153] SEQ ID NOs: 702-709 show the nucleotide sequences of reverse transcriptases cloned into a tethered MG3-6(H586A) plasmid.

[0154] SEQ ID NOs: 710-727 show the nucleotide sequences of genes encoding MG151 reverse transcriptase proteins optimized for expression in mammalian cells and cloned into an untethered plasmid.

[0155] SEQ ID NOs: 728-749 show the nucleotide sequences of genes encoding MG160 reverse transcriptase proteins optimized for expression in mammalian cells and cloned into a tethered spCas9(H840A) plasmid.

[0156] SEQ ID NOs: 750-766 show the nucleotide sequences of genes encoding MG151 reverse transcriptase proteins optimized for expression in mammalian cells and cloned into an untethered plasmid.

[0157] SEQ ID NOs: 767-784 show the full-length peptide sequences of MG151 reverse transcriptase proteins.

[0158] SEQ ID NOs: 786-1220 show the full-length peptide sequences of MG160 reverse transcriptase proteins.

[0159] SEQ ID NOs: 1221-1226, and 1299 show the nucleotide sequences of genes encoding MG153 reverse transcriptase proteins optimized for expression in mammalian cells and cloned into an untethered plasmid.

[0160] SEQ ID NOs: 1227-1243, 1250-1256, and 1265-1271 show the nucleotide sequences of genes encoding MG160 reverse transcriptase proteins optimized for expression in mammalian cells and cloned into a tethered spCas9 (H840A) plasmid.

[0161] SEQ ID NOs: 1245-1246 show the nucleotide sequences of RT linkers.

[0162] SEQ ID NOs: 1257-1264 and 1272-1279 show the nucleotide sequences of genes encoding MG160 reverse transcriptase proteins optimized for expression in mammalian cells and cloned into an untethered plasmid.

[0163] SEQ ID NOs: 1280-1292, and 1299 show the nucleotide sequences of genes encoding reverse transcriptase proteins optimized for expression in mammalian cells and cloned into an untethered plasmid.

[0164] SEQ ID NOs: 1293-1295, and 1300 show the nucleotide sequences of genes encoding reverse transcriptase proteins optimized for expression in mammalian cells and cloned into a tethered or untethered plasmid.

[0165] SEQ ID NOs: 1301-1304, and 1309 show the nucleotide sequences of genes encoding mutant reverse transcriptase proteins optimized for expression in mammalian cells and cloned into a tethered or untethered plasmid.

[0166] SEQ ID NOs: 1336-1341 show the nucleotide sequences of chemically modified guide RNAs with a single point mutation (AAVS1 spacer G to T) with PBS of different lengths suitable for the gene editing systems described herein.

[0167] SEQ ID NOs: 1330-1335 show the nucleotide sequences of chemically modified guide RNAs with a single deletion (AAVS1 spacer deletion change) with PBS of different lengths suitable for the gene editing systems described herein.

[0168] SEQ ID NOs: 1324-1329 show the nucleotide sequences of chemically modified guide RNAs with a single insertion (AAVS1 spacer single insertion) with PBS of different lengths suitable for the gene editing systems described herein.

[0169] SEQ ID NOs: 1310-1315 show the nucleotide sequences of chemically modified guide RNAs (for targeting AAVS1) with a 5 nucleotide change with PBS of different lengths suitable for the gene editing systems described herein.

[0170] SEQ ID NOs: 1317-1323 show the nucleotide sequences of chemically modified guide RNAs (for targeting AAVS1) with a modified backbone with PBS of different lengths suitable for the gene editing systems described herein.

[0171] SEQ ID NOs: 1342-1343 show the nucleotide sequence of MG71-2 AAVS1 primers.

[0172] SEQ ID NO: 1344 shows the nucleotide sequence of a cDNA encoding a gene target.

[0173] SEQ ID NO: 1247 shows the nucleotide sequence of a spCas9(H840A) untethered or tethered plasmid.

[0174] SEQ ID NO: 1248 shows the nucleotide sequence of MMLV1 codon optimized for expression in mammalian cells and cloned into a tethered or untethered plasmid.

[0175] SEQ ID NO: 1249 shows the nucleotide sequence of MMLV2 codon optimized for expression in mammalian cells and cloned into a tethered or untethered plasmid.

[0176] SEQ ID NOs: 1345-1353 show the nucleotide sequences of ncRNAs.

[0177] SEQ ID NOs: 1354-1361 show the nucleotide sequences of primers.

[0178] SEQ ID NOs: 1362-1393 show the nucleotide sequences of ncRNAs.

[0179] SEQ ID NOs: 1394-1401 show the nucleotide sequences of MG173 family reverse transcriptases codon optimized for expression in mammalian cells and cloned into an untethered plasmid.

[0180] SEQ ID NO: 1402 shows the nucleotide sequence of an MG192 family reverse transcriptase codon optimized for expression in mammalian cells and cloned into an untethered plasmid.

[0181] SEQ ID NOs: 1403-1424 show the nucleotide sequences of MG160 family reverse transcriptases codon optimized for expression in mammalian cells and cloned into a tethered plasmid.

[0182] SEQ ID NOs: 1426-1438 show the nucleotide sequences of MG151 family reverse transcriptases codon optimized for expression in mammalian cells and cloned into a tethered or untethered plasmid.

[0183] SEQ ID NOs: 1439-1444 show the nucleotide sequences of MG153 family reverse transcriptases codon optimized for expression in mammalian cells and cloned into a tethered or untethered plasmid.

[0184] SEQ ID NOs: 1445-1446 show the nucleotide sequences of MG160 family reverse transcriptases codon optimized for expression in mammalian cells and cloned into a tethered plasmid.

[0185] SEQ ID NOs: 1447 show the nucleotide sequence of an MG151 family reverse transcriptase codon optimized for expression in mammalian cells and cloned into a tethered or untethered plasmid.

[0186] SEQ ID NOs: 1448-1450 show the nucleotide sequences of MG71-2 scaffolds.

[0187] SEQ ID NOs: 1451-1462 show the nucleotide sequences of chemically modified guide RNAs (for targeting AAVS1) with a 5 nucleotide change with PBS of different lengths suitable for the gene editing systems described herein.

[0188] SEQ ID NOs: 1463-1470 show the nucleotide sequences of chemically modified guide RNAs (for targeting AAVS1) with a modified scaffold with PBS of different lengths suitable for the gene editing systems described herein.

[0189] SEQ ID NOs: 1471-1474 show the nucleotide sequences of chemically modified guide RNAs (for targeting AAVS1) with a 2 nucleotide change with PBS of different lengths suitable for the gene editing systems described herein.

[0190] SEQ ID NO: 1475 shows the nucleotide sequence of an mRNA encoding MG3-6 codon optimized for expression in mammalian cells.

[0191] SEQ ID NO: 1476 shows the nucleotide sequence of an mRNA encoding MG3-6/3-8 codon optimized for expression in mammalian cells.

[0192] SEQ ID NO: 1477 shows the nucleotide sequence of an mRNA encoding MG14-241 codon optimized for expression in mammalian cells.

[0193] SEQ ID NO: 1478 shows the nucleotide sequence of an mRNA encoding MG14-241 (H596A) codon optimized for expression in mammalian cells.

[0194] SEQ ID NOs: 1479-1492 show the nucleotide sequences of chemically modified guide RNAs (for targeting AAVS1) with a 5 nucleotide change with PBS of different lengths suitable for the gene editing systems described herein.

[0195] SEQ ID NOs: 1493-1504 show the nucleotide sequences of NGS primers.

[0196] SEQ ID NOs: 1505-1510 show the nucleotide sequences of cDNAs for endogenous targets.

[0197] SEQ ID NO: 1511 shows the nucleotide sequence of an engineered landing pad.

[0198] SEQ ID NOs: 1512-1516 show the nucleotide sequences of Cas9 guides targeting the engineered site.

[0199] SEQ ID NOs: 1518-1519 show the nucleotide sequences of primers.

[0200] SEQ ID NOs: 1520-1531 show nucleotide sequences encoding MG RT/Cas9 fusion proteins codon optimized for expression in mammalian systems.

[0201] SEQ ID NOs: 1532-1540 show the nucleotide sequences of RNA cargoes for integration.

[0202] SEQ ID NOs: 1541-1547 show the nucleotide sequences of primers.

[0203] SEQ ID NOs: 1548-1555 show the nucleotide sequences of RNA templates.

[0204] SEQ ID NOs: 1557-1560 show the nucleotide sequences of primers.

[0205] SEQ ID NOs: 1561-1562 show the nucleotide sequences of Taqman probes.

[0206] SEQ ID NO: 1563 shows the nucleotide sequence of an nMRA encoding MG71-2 codon optimized for expression in mammalian systems.

[0207] SEQ ID NO: 1564 shows the nucleotide sequence of an MG71-2 guide.

[0208] SEQ ID NOs: 1566-1567 show the nucleotide sequences of NGS primers.

[0209] SEQ ID NOs: 1568-1573 show the nucleotide sequences of MG71-2 guides.

[0210] SEQ ID NOs: 1574-1576 show the nucleotide sequences of MG71-2 pegRNAs.

[0211] SEQ ID NOs: 1577-1578 show the nucleotide sequences of NGS primers.

[0212] SEQ ID NO: 1579 shows the nucleotide sequence of a cDNA encoding an endogenous target.

[0213] SEQ ID NOs: 1580-1581 show the nucleotide sequences of NGS primers.

[0214] SEQ ID NO: 1582 shows the nucleotide sequence of a cDNA encoding an endogenous target.

[0215] SEQ ID NOs: 1583-1584 show the nucleotide sequences of NGS primers.

[0216] SEQ ID NO: 1585 shows the nucleotide sequence of a cDNA encoding an endogenous target.

[0217] SEQ ID NOs: 1586-1587 show the nucleotide sequences of NGS primers.

[0218] SEQ ID NO: 1588 shows the nucleotide sequence of a cDNA encoding an endogenous target.

[0219] SEQ ID NOs: 1589-1590 show the nucleotide sequences of NGS primers.

[0220] SEQ ID NO: 1591 shows the nucleotide sequence of a cDNA encoding an endogenous target.

[0221] SEQ ID NOs: 1592-1593 show the nucleotide sequences of reverse transcriptases codon optimized for expression in mammalian cells and cloned into a tethered plasmid.

[0222] SEQ ID NOs: 1596-1597 show the nucleotide sequence of reverse transcriptases codon optimized for expression in mammalian cells and cloned into a tethered or untethered plasmid.

[0223] SEQ ID NOs: 1598-1609 show the nucleotide sequences of MG71-2 pegRNAs.

[0224] SEQ ID NOs: 1610-1620 show the nucleotide sequences of MG71-2 guides.

[0225] SEQ ID NOs: 1621-1622 show the nucleotide sequences of NGS primers.

[0226] SEQ ID NO: 1623 shows the nucleotide sequence of a cDNA encoding an endogenous target.

[0227] SEQ ID NOs: 1624-1625 show the nucleotide sequences of NGS primers.

[0228] SEQ ID NO: 1626 shows the nucleotide sequence of a cDNA encoding an endogenous target.

[0229] SEQ ID NOs: 1627-1628 show the nucleotide sequences of NGS primers.

[0230] SEQ ID NO: 1629 shows the nucleotide sequence of a cDNA encoding an endogenous target.

[0231] SEQ ID NOs: 1630-1631 show the nucleotide sequences of NGS primers.

[0232] SEQ ID NO: 1632 shows the nucleotide sequence of a cDNA encoding an endogenous target.

[0233] SEQ ID NOs: 1633-1634 show the nucleotide sequences of NGS primers.

[0234] SEQ ID NO: 1635 shows the nucleotide sequence of a cDNA encoding an endogenous target.

[0235] SEQ ID NOs: 1636-1637 show the nucleotide sequences of NGS primers.

[0236] SEQ ID NO: 1638 shows the nucleotide sequence of a cDNA encoding an endogenous target.

[0237] SEQ ID NOs: 1639-1640 show the nucleotide sequences of NGS primers.

[0238] SEQ ID NO: 1641 shows the nucleotide sequence of a cDNA encoding an endogenous target.

[0239] SEQ ID NOs: 1642-1643 show the nucleotide sequences of NGS primers.

[0240] SEQ ID NO: 1644 shows the nucleotide sequence of a cDNA encoding an endogenous target.

[0241] SEQ ID NOs: 1645-1646 show the nucleotide sequences of NGS primers.

[0242] SEQ ID NO: 1647 shows the nucleotide sequence of a cDNA encoding an endogenous target.

[0243] SEQ ID NOs: 1648-1649 show the nucleotide sequences of NGS primers.

[0244] SEQ ID NO: 1650 shows the nucleotide sequence of a cDNA encoding an endogenous target.

[0245] SEQ ID NOs: 1651-1652 show the nucleotide sequences of NGS primers.

[0246] SEQ ID NO: 1653 shows the nucleotide sequence of a cDNA encoding an endogenous target.

[0247] SEQ ID NO: 1654 shows the nucleotide sequence of reverse transcriptases codon optimized for expression in mammalian cells and cloned into plasmids.

[0248] SEQ ID NOs: 1656-1681 show the nucleotide sequences of MG71-2 pegRNAs.

[0249] SEQ ID NO: 1682 shows the nucleotide sequence of a primer.

[0250] SEQ ID NOs: 1683-1690 show the nucleotide sequences of MG71-2 pegRNAs.

[0251] SEQ ID NOs: 1691-1720 show nucleotide sequences of reverse transcriptases codon optimized for expression in mammalian cells and cloned into plasmids.

[0252] SEQ ID NOs: 1722-1749 show the nucleotide sequences of MG3-6/3-8 guides.

[0253] SEQ ID NOs: 1750-1751 show the nucleotide sequences of NGS primers.

[0254] SEQ ID NO: 1752 shows the nucleotide sequence of a cDNA encoding an endogenous target.

[0255] SEQ ID NOs: 1753-1754 show the nucleotide sequences of reverse transcriptases codon optimized for expression in mammalian cells and cloned into plasmids.

[0256] SEQ ID NOs: 1755-1774 show the nucleotide sequences of MG3-6/3-8 pegRNAs.

[0257] SEQ ID NOs: 1776-1778 show the nucleotide sequences of reverse transcriptases codon optimized for expression in mammalian cells and cloned into plasmids.

[0258] SEQ ID NO: 1779 shows the nucleotide sequence of a target codon optimized for expression in mammalian cells.

[0259] SEQ ID NOs: 1780-1783 show the nucleotide sequences of reverse transcriptases codon optimized for expression in mammalian cells and cloned into plasmids.

[0260] SEQ ID NOs: 1784-1786 show the nucleotide sequences of MG3-6 pegRNAs.

[0261] SEQ ID NOs: 1787-1788 show the nucleotide sequences of NGS primers.

[0262] SEQ ID NO: 1789 shows the nucleotide sequence of a cDNA encoding an endogenous target.

[0263] SEQ ID NOs: 1790-1847 show the nucleotide sequences of reverse transcriptases codon optimized for expression in mammalian cells and cloned into plasmids.

[0264] SEQ ID NOs: 1848-1855 show the nucleotide sequences of MG71-2 pegRNAs.

[0265] SEQ ID NOs: 1856-1858 show the nucleotide sequences of reverse transcriptases codon optimized for expression in mammalian cells and cloned into plasmids.

[0266] SEQ ID NOs: 1859-1862 show the nucleotide sequences of plasmids encoding MG nickases codon optimized for expression in mammalian cells.

[0267] SEQ ID NOs: 1863-1910 show the nucleotide sequences of MG71-2 guide RNAs targeting AAVS1.

[0268] SEQ ID NOs: 1911-1958 show the DNA sequences of AAVS1 target sites.

[0269] SEQ ID NOs: 1959-2002 show the full-length peptide sequences of MG140 reverse transcriptase proteins.

[0270] SEQ ID NOs: 2003-2084 show the full-length peptide sequences of MG153 reverse transcriptase proteins.

[0271] SEQ ID NOs: 2085-2092 show the full-length peptide sequences of MG157 reverse transcriptase proteins.

[0272] SEQ ID NOs: 2093-2112 show the full-length peptide sequences of MG165 reverse transcriptase proteins.

[0273] SEQ ID NOs: 2113-2156 show the full-length peptide sequences of MG166 reverse transcriptase proteins.

[0274] SEQ ID NOs: 2157-2186 show the full-length peptide sequences of MG167 reverse transcriptase proteins.

[0275] SEQ ID NOs: 2187-2223 show the full-length peptide sequences of MG169 reverse transcriptase proteins.

[0276] SEQ ID NO: 2224 shows the full-length peptide sequence of an MG176 reverse transcriptase protein.

[0277] SEQ ID NOs: 2225-2252 show the full-length peptide sequences of MG198 reverse transcriptase proteins.

[0278] SEQ ID NOs: 2253-2256 show the full-length peptide sequences of MG173 reverse transcriptase proteins.

[0279] SEQ ID NOs: 2257-2289 show the full-length peptide sequences of MG140 reverse transcriptase proteins.

[0280] SEQ ID NOs: 2290-2471 and 2582-2585 show the full-length peptide sequences of MG160 reverse transcriptase proteins.

[0281] SEQ ID NOs: 2472-2517 show the full-length peptide sequences of MG140 retrotransposition proteins.

[0282] SEQ ID NOs: 2518-2520 show the full-length peptide sequences of MG160 retrotransposition proteins.

[0283] SEQ ID NO: 2522 shows the full-length peptide sequence of an MG153 reverse transcriptase protein.

[0284] SEQ ID NOs: 2523-2530 show the nucleotide sequences of MG140 UTRs.

[0285] SEQ ID NOs: 2531-2540 show the nucleotide sequences of MG153 RNAs.

[0286] SEQ ID NOs: 2541-2571 show the nucleotide sequences of MG140 UTRs.

### DETAILED DESCRIPTION

[0287] Site-directed gene editing systems are powerful tools for site-directed genome engineering in cells. Programmable nucleases such as Clustered Regularly Interspaced Short Palindromic Repeats (CRISPR) nucleases have been used recently for diverse DNA manipulation and gene editing applications. CRISPR nucleases can be used with or without a repair template to introduce site-directed insertions and deletions (indels) or varying length as well as point mutations. Single nucleotide point (SNP) mutations, deletions, and insertions represent over 80% of disease-causing mutations. However, not all of these mutations can be accurately repaired with the available gene editing systems. Clinical genome editing applications with a higher efficiency and fidelity of the system are needed.

[0288] Additionally, the repair or insertion of longer pieces of DNA has remained challenging, and a safe and efficient way of targeted integration of large templates into a genome, for example for gene therapies or engineered cell therapies, is lacking. To date, lentiviruses or adeno-associated viruses (AAV) in combination with a CRISPR nuclease are used to insert large pieces of DNA, for example whole genes. However, lentiviral-mediated integration lacks the targetability feature, as integration occurs mostly randomly in open chromatin. AAV-mediated delivery has a limited cargo capacity and is not available for all cell types. A safe and efficient targeted genome editing system that allows for large template integration is needed.

[0289] The present disclosure is based, in part, upon the development of a gene editing system comprising a reverse transcriptase, a nuclease or nickase, and a guide RNA or pegRNA. The gene editing system can be used to introduce site-directed insertions, deletions, and mutations in the genome of cells. Furthermore, it is contemplated that the gene editing system can be used in combination with a nucleic acid template to facilitate site-directed insertions into the genome of a cell, as well as for large template integration.

### Definitions

[0290] Unless defined otherwise, all technical and scientific terms used herein have the same meaning as is commonly understood by one of skill in the art to which the claimed subject matter belongs. It is to be understood that the foregoing general description and the following detailed description are exemplary and explanatory only and are not restrictive of any subject matter claimed. The section headings used herein are for organizational purposes only and are not to be construed as limiting the subject matter described.

[0291] The practice of some methods disclosed herein employ, unless otherwise indicated, techniques of immunology, biochemistry, chemistry, molecular biology, microbiology, cell biology, genomics, and recombinant DNA. See for example Sambrook and Green, Molecular Cloning: A Laboratory Manual 4th Edition (2012); the series Current Protocols in Molecular Biology (F. M. Ausubel, et al. eds.); the series Methods In Enzymology (Academic Press, Inc.), PCR 2: A Practical Approach (M. J. MacPherson, B. D. Hames and G. R. Taylor eds. (1995)), Harlow and Lane, eds. (1988) Antibodies, A Laboratory Manual, and Culture of Animal Cells: A Manual of Basic Technique and Specialized Applications, 6th Edition (R. I. Freshney, ed. (2010)).

[0292] As used herein, the singular forms “a”, “an” and “the” are intended to include the plural forms as well, unless the context clearly indicates otherwise. Furthermore, to the extent that the terms “including”, “includes”, “having”, “has”, “with”, or variants thereof are used in either the detailed description and/or the claims, such terms are intended to be inclusive in a manner similar to the term “comprising”.

[0293] The term “about” or “approximately” means within an acceptable error range for the particular value as determined by one of ordinary skill in the art, which will depend in part on how the value is measured or determined, i.e., the limitations of the measurement system. For example, “about” can mean within one or more than one standard deviation, per the practice in the art. Alternatively, “about” can mean a range of up to 20%, up to 15%, up to 10%, up to 5%, or up to 1% of a given value.

[0294] The term “nucleotide,” as used herein, refers to a base-sugar-phosphate combination. Contemplated nucleotides include naturally occurring nucleotides and synthetic nucleotides. Nucleotides are monomeric units of a nucleic acid sequence (e.g., deoxyribonucleic acid (DNA) and ribonucleic acid (RNA)). The term nucleotide includes ribonucleoside triphosphates adenosine triphosphate (ATP), uridine triphosphate (UTP), cytosine triphosphate (CTP), guanosine triphosphate (GTP) and deoxyribonucleoside triphosphates such as dATP, dCTP, dITP, dUTP, dGTP, dTTP, or derivatives thereof. Such derivatives include, for example, [αS]dATP, 7-deaza-dGTP and 7-deaza-dATP, and nucleotide derivatives that confer nuclease resistance on the nucleic acid molecule containing them. The term nucleotide as used herein encompasses dideoxyribonucleoside triphosphates (ddNTPs) and their derivatives. Illustrative examples of ddNTPs include, but are not limited to, ddATP, ddCTP, ddGTP, ddITP, and ddTTP. A nucleotide may be unlabeled or detectably labeled, such as using moieties comprising optically detectable moieties (e.g., fluorophores) or quantum dots. Detectable labels include, for example, radioactive isotopes, fluorescent labels, chemiluminescent labels, bioluminescent labels, and enzyme labels. Fluorescent labels of nucleotides include but are not limited fluorescein, 5-carboxyfluorescein (FAM), 2′7′-dimethoxy-4′5-dichloro-6-carboxyfluorescein (JOE), rhodamine, 6-carboxyrhodamine (R6G), N,N,N′,N′-tetramethyl-6-carboxyrhodamine (TAMRA), 6-carboxy-X-rhodamine (ROX), 4-(4′dimethylaminophenylazo) benzoic acid (DABCYL), Cascade Blue, Oregon Green, Texas Red, Cyanine and 5-(2′-aminoethyl)aminonaphthalene-1-sulfonic acid (EDANS). Specific examples of fluorescently labeled nucleotides include [R6G]dUTP, [TAMRA]dUTP, [R110]dCTP, [R6G]dCTP, [TAMRA]dCTP, [JOE]ddATP, [R6G]ddATP, [FAM]ddCTP, [R110]ddCTP, [TAMRA]ddGTP, [ROX]ddTTP, [dR6G]ddATP, [dR110]ddCTP, [dTAMRA]ddGTP, and [dROX]ddTTP available from Perkin Elmer, Foster City, Calif, FluoroLink DeoxyNucleotides, FluoroLink Cy3-dCTP, FluoroLink Cy5-dCTP, FluoroLink Fluor X-dCTP, FluoroLink Cy3-dUTP, and FluoroLink Cy5-dUTP available from Amersham, Arlington Heights, IL; Fluorescein-15-dATP, Fluorescein-12-dUTP, Tetramethyl-rodamine-6-dUTP, IR770-9-dATP, Fluorescein-12-ddUTP, Fluorescein-12-UTP, and Fluorescein-15-2′-dATP available from Boehringer Mannheim, Indianapolis, Ind.; and Chromosome Labeled Nucleotides, BODIPY-FL-14-UTP, BODIPY-FL-4-UTP, BODIPY-TMR-14-UTP, BODIPY-TMR-14-dUTP, BODIPY-TR-14-UTP, BODIPY-TR-14-dUTP, Cascade Blue-7-UTP, Cascade Blue-7-dUTP, fluorescein-12-UTP, fluorescein-12-dUTP, Oregon Green 488-5-dUTP, Rhodamine Green-5-UTP, Rhodamine Green-5-dUTP, tetramethylrhodamine-6-UTP, tetramethylrhodamine-6-dUTP, Texas Red-5-UTP, Texas Red-5-dUTP, and Texas Red-12-dUTP available from Molecular Probes, Eugene, Oreg. The term nucleotide encompasses chemically modified nucleotides. An exemplary chemically-modified nucleotide is biotin-dNTP. Non-limiting examples of biotinylated dNTPs include, biotin-dATP (e.g., bio-N6-ddATP, biotin-14-dATP), biotin-dCTP (e.g., biotin-11-dCTP, biotin-14-dCTP), and biotin-dUTP (e.g., biotin-11-dUTP, biotin-16-dUTP, biotin-20-dUTP).

[0295] The terms “polynucleotide,” “oligonucleotide,” and “nucleic acid” are used interchangeably to refer to a polymeric form of nucleotides of any length, either deoxyribonucleotides or ribonucleotides, or analogs thereof, either in single-, double-, or multi-stranded form. Contemplated polynucleotides include a gene or fragment thereof. Exemplary polynucleotides include, but are not limited to, DNA, RNA, coding or non-coding regions of a gene or gene fragment, loci (locus) defined from linkage analysis, exons, introns, messenger RNA (mRNA), transfer RNA (tRNA), ribosomal RNA (rRNA), short interfering RNA (siRNA), short-hairpin RNA (shRNA), micro-RNA (miRNA), ribozymes, cDNA, recombinant polynucleotides, branched polynucleotides, plasmids, vectors, cell-free polynucleotides including cell-free DNA (cfDNA) and cell-free RNA (cfRNA), nucleic acid probes, and primers. In a polynucleotide when referring to a T, a T means U (Uracil) in RNA and T (Thymine) in DNA. A polynucleotide can be exogenous or endogenous to a cell and/or exist in a cell-free environment. The term polynucleotide encompasses modified polynucleotides (e.g., altered backbone, sugar, or nucleobase). If present, modifications to the nucleotide structure are imparted before or after assembly of the polymer. Non-limiting examples of modifications include: 5-bromouracil, peptide nucleic acid, xeno nucleic acid, morpholinos, locked nucleic acids, glycol nucleic acids, threose nucleic acids, dideoxynucleotides, cordycepin, 7-deaza-GTP, fluorophores (e.g., rhodamine or fluorescein linked to the sugar), thiol-containing nucleotides, biotin-linked nucleotides, fluorescent base analogs, CpG islands, methyl-7-guanosine, methylated nucleotides, inosine, thiouridine, pseudouridine, dihydrouridine, queuosine, and wyosine. The sequence of nucleotides may be interrupted by non-nucleotide components.

[0296] The terms “transfection” or “transfected” refer to introduction of a polynucleotide into a cell by non-viral or viral-based methods. The polynucleotides may be gene sequences encoding complete proteins or functional portions thereof. See, e.g., Sambrook et al., 1989, Molecular Cloning: A Laboratory Manual, 18.1-18.88.

[0297] The terms “peptide,” “polypeptide,” and “protein” are used interchangeably herein to refer to a polymer of at least two amino acid residues joined by peptide bond(s). This term does not connote a specific length of polymer, nor is it intended to imply or distinguish whether the peptide is produced using recombinant techniques, chemical or enzymatic synthesis, or is naturally occurring. The terms apply to naturally occurring amino acid polymers as well as amino acid polymers comprising at least one modified amino acid. In some cases, the polymer is interrupted by non-amino acids. The terms include amino acid chains of any length, including full length proteins, and proteins with or without secondary or tertiary structure (e.g., domains). The terms also encompass an amino acid polymer that has been modified, for example, by disulfide bond formation, glycosylation, lipidation, acetylation, phosphorylation, oxidation, and any other manipulation such as conjugation with a labeling component. The terms “amino acid” and “amino acids,” as used herein, refer to natural and non-natural amino acids, including, but not limited to, modified amino acids. Modified amino acids include amino acids that have been chemically modified to include a group or a chemical moiety not naturally present on the amino acid. The term “amino acid” includes both D-amino acids and L-amino acids.

[0298] As used herein, the “non-native” refers to a nucleic acid or polypeptide sequence that is non-naturally occurring. Non-native refers to a non-naturally occurring nucleic acid or polypeptide sequence that comprises modifications such as mutations, insertions, or deletions. The term non-native encompasses fusion nucleic acids or polypeptides that encodes or exhibits an activity (e.g., enzymatic activity, methyltransferase activity, acetyltransferase activity, kinase activity, ubiquitinating activity, etc.) of the nucleic acid or polypeptide sequence to which the non-native sequence is fused. A non-native nucleic acid or polypeptide sequence includes those linked to a naturally-occurring nucleic acid or polypeptide sequence (or a variant thereof) by genetic engineering to generate a chimeric nucleic acid or polypeptide sequence encoding a chimeric nucleic acid or polypeptide.

[0299] The term “promoter”, as used herein, refers to the regulatory DNA region which controls transcription or expression of a polynucleotide (e.g., a gene) and which may be located adjacent to or overlapping a nucleotide or region of nucleotides at which RNA transcription is initiated. A promoter may contain specific DNA sequences which bind protein factors, often referred to as transcription factors, which facilitate binding of RNA polymerase to the DNA leading to gene transcription. Eukaryotic basal promoters typically, though not necessarily, contain a TATA-box and/or a CAAT box.

[0300] The term “expression”, as used herein, refers to the process by which a nucleic acid sequence or a polynucleotide is transcribed from a DNA template (such as into mRNA or other RNA transcript) and/or the process by which a transcribed mRNA is subsequently translated into peptides, polypeptides, or proteins. Transcripts and encoded polypeptides may be collectively referred to as “gene product.” If the polynucleotide is derived from genomic DNA, the term expression includes splicing of the mRNA in a eukaryotic cell.

[0301] As used herein, “operably linked”, “operable linkage”, “operatively linked”, or grammatical equivalents thereof refer to an arrangement of genetic elements, e.g., a promoter, an enhancer, a polyadenylation sequence, etc., wherein an operation (e.g., movement or activation) of a first genetic element has some effect on the second genetic element. The effect on the second genetic element can be, but need not be, of the same type as operation of the first genetic element. For example, two genetic elements are operably linked if movement of the first element causes an activation of the second element. For instance, a regulatory element, which may comprise promoter and/or enhancer sequences, is operatively linked to a coding region if the regulatory element helps initiate transcription of the coding sequence. There may be intervening residues between the regulatory element and coding region so long as this functional relationship is maintained.

[0302] A “vector” as used herein, refers to a macromolecule or association of macromolecules that comprises or associates with a polynucleotide and which mediates delivery of the polynucleotide to a cell. Examples of vectors include nucleic-based vectors (e.g., plasmids and viral vectors) and liposomes. An exemplary nucleic-acid based vector comprises genetic elements, e.g., regulatory elements, operatively linked to a gene to facilitate expression of the gene in a target.

[0303] As used herein, “expression cassette” and “nucleic acid cassette” are used interchangeably to refer to a component of a vector comprising a combination of nucleic acid sequences or elements (e.g., therapeutic gene, promoter, and a terminator) that are expressed together or are operably linked for expression. The terms encompass an expression cassette including a combination of regulatory elements and a gene or genes to which they are operably linked for expression.

[0304] A “functional fragment” of a DNA or protein sequence refers to a fragment that retains a biological activity (either functional or structural) that is substantially similar to a biological activity of the full-length DNA or protein sequence. A biological activity of a DNA sequence includes its ability to influence expression in a manner attributed to the full-length sequence.

[0305] The terms “engineered,” “synthetic,” and “artificial” are used interchangeably herein to refer to an object that has been modified by human intervention. For example, the terms refer to a polynucleotide or polypeptide that is non-naturally occurring. An engineered peptide has, but does not require, low sequence identity (e.g., less than 50% sequence identity, less than 25% sequence identity, less than 10% sequence identity, less than 5% sequence identity, less than 1% sequence identity) to a naturally occurring human protein. For example, VPR and VP64 domains are synthetic transactivation domains. Non-limiting examples include the following: a nucleic acid modified by changing its sequence to a sequence that does not occur in nature; a nucleic acid modified by ligating it to a nucleic acid that it does not associate with in nature such that the ligated product possesses a function not present in the original nucleic acid; an engineered nucleic acid synthesized in vitro with a sequence that does not exist in nature; a protein modified by changing its amino acid sequence to a sequence that does not exist in nature; an engineered protein acquiring a new function or property. An “engineered” system comprises at least one engineered component.

[0306] As used herein, a “guide nucleic acid” or “guide polynucleotide” refers to a nucleic acid that may hybridize to a target nucleic acid and thereby directs an associated nuclease to the target nucleic acid. A guide nucleic acid is, but is not limited to, RNA (guide RNA or gRNA), DNA, or a mixture of RNA and DNA. A guide nucleic acid can include a crRNA or a tracrRNA or a combination of both. The term guide nucleic acid encompasses an engineered guide nucleic acid and a programmable guide nucleic acid to specifically bind to the target nucleic acid. A portion of the target nucleic acid may be complementary to a portion of the guide nucleic acid. The strand of a double-stranded target polynucleotide that is complementary to and hybridizes with the guide nucleic acid is the complementary strand. The strand of the double-stranded target polynucleotide that is complementary to the complementary strand, and therefore is not complementary to the guide nucleic acid is called noncomplementary strand. A guide nucleic acid having a polynucleotide chain is a “single guide nucleic acid.” A guide nucleic acid having two polynucleotide chains is a “double guide nucleic acid.” If not otherwise specified, the term “guide nucleic acid” is inclusive, referring to both single guide nucleic acids and double guide nucleic acids. A guide nucleic acid may comprise a segment referred to as a “nucleic acid-targeting segment” or a “nucleic acid-targeting sequence,” or a “spacer.” A nucleic acid-targeting segment can include a sub-segment referred to as a “protein binding segment” or “protein binding sequence” or “Cas protein binding segment.”

[0307] The term “tracrRNA” or “tracr sequence” means trans-activating CRISPR RNA. tracrRNA interacts with the CRISPR (cr) RNA to form a guide nucleic acid (e.g., guide RNA or gRNA) that may hybridize to a target nucleic acid and thereby directs an associated nuclease to the target nucleic acid.

[0308] As used herein, the term “RuvC_III domain” refers to a third discontinuous segment of a RuvC endonuclease domain (the RuvC nuclease domain being comprised of three discontiguous segments, RuvC_I, RuvC_II, and RuvC_III). A RuvC domain or segments thereof can generally be identified by alignment to documented domain sequences, structural alignment to proteins with annotated domains, or by comparison to Hidden Markov Models (HMMs) built based on documented domain sequences (e.g., Pfam HMM PF18541 for RuvC_III).

[0309] As used herein, the term “HNH domain” refers to an endonuclease domain having characteristic histidine and asparagine residues. An HNH domain can generally be identified by alignment to documented domain sequences, structural alignment to proteins with annotated domains, or by comparison to Hidden Markov Models (HMMs) built based on documented domain sequences (e.g., Pfam HMM PF01844 for domain HNH).

[0310] As used herein, the term “transposon” refers to mobile elements that move in and out of genomes carrying “cargo DNA” with them. These transposons can differ on the type of nucleic acid to transpose, the type of repeat at the ends of the transposon, the type of cargo to be carried, or by the mode of transposition (i.e., self-repair or host-repair).

[0311] As used herein, the term “transposase” or “transposases” refers to an enzyme that binds to the end of a transposon and catalyzes its movement to another part of the genome. Types of movement include a cut and paste mechanism and a replicative transposition mechanism.

[0312] As used herein, the term “Tn7” or “Tn7-like transposase” refers to a family of transposases comprising three main components: a heteromeric transposase (TnsA and/or TnsB) alongside a regulator protein (TnsC). In addition to the TnsABC transposition proteins, Tn7 elements can encode dedicated target site-selection proteins, TnsD and TnsE. In conjunction with TnsABC, the sequence-specific DNA-binding protein TnsD directs transposition into a conserved site referred to as the “Tn7 attachment site,” attTn7. TnsD is a member of a large family of proteins that also includes TniQ. TniQ has been shown to target transposition into resolution sites of plasmids.

[0313] As used herein, the terms “gene editing” and “genome editing” can be used interchangeably. Gene editing or genome editing means to change the nucleic acid sequence of a gene or a genome. Genome editing can include, for example, insertions, deletions, and mutations. Genome editing can be performed by a gene editing system, for example a nuclease, a reverse transcriptase, a recombinase, or a base editor.

[0314] As used herein, the term “recombinase” refers to an enzyme that mediates the recombination of DNA fragments located between recombinase recognition sequences, which results in the excision, insertion, inversion, exchange or translocation) of the DNA fragments located between the recombinase recognition sequences.

[0315] As used herein, the term “recombine,” or “recombination,” in the context of a nucleic acid modification (e.g., a genomic modification), refers to the process by which two or more nucleic acid molecules, or two or more regions of a single nucleic acid molecule, are modified by the action of a recombinase protein. Recombination can result in, inter alia, the insertion, inversion, excision, or translocation of a nucleic acid sequence, e.g., in or between one or more nucleic acid molecules.

[0316] As used herein, the term “complex” refers to a joining of at least two components. The two components may each retain the properties/activities they had prior to forming the complex or gain properties as a result of forming the complex. The joining includes, but is not limited to, covalent bonding, non-covalent bonding (i.e., hydrogen bonding, ionic interactions, Van der Waals interactions, and hydrophobic bond), use of a linker, fusion, or any other suitable method. Contemplated components of the complex include polynucleotides, polypeptides, or combinations thereof. For example, a complex comprises an endonuclease and a guide polynucleotide.

[0317] The term “sequence identity” or “percent identity” in the context of two or more nucleic acids or polypeptide sequences, refers to two (e.g., in a pairwise alignment) or more (e.g., in a multiple sequence alignment) sequences that are the same or have a specified percentage of amino acid residues or nucleotides that are the same, when compared and aligned for maximum correspondence over a local or global comparison window, as measured using a sequence comparison algorithm. Suitable sequence comparison algorithms for polypeptide sequences include, e.g., BLASTP using parameters of a wordlength (W) of 3, an expectation (E) of 10, and the BLOSUM62 scoring matrix setting gap costs at existence of 11, extension of 1, and using a conditional compositional score matrix adjustment for polypeptide sequences longer than 30 residues; BLASTP using parameters of a wordlength (W) of 2, an expectation (E) of 1000000, and the PAM30 scoring matrix setting gap costs at 9 to open gaps and 1 to extend gaps for sequences of less than 30 residues (these are the default parameters for BLASTP in the BLAST suite available at https://blast.ncbi.nlm.nih.gov); CLUSTALW with the Smith-Waterman homology search algorithm parameters with a match of 2, a mismatch of −1, and a gap of −1; MUSCLE with default parameters; MAFFT with parameters of a retree of 2 and max iterations of 1000; Novafold with default parameters; HNMER hmmalign with default parameters.

[0318] The term “optimally aligned” in the context of two or more nucleic acids or polypeptide sequences, refers to two (e.g., in a pairwise alignment) or more (e.g., in a multiple sequence alignment) sequences that have been aligned to maximal correspondence of amino acids residues or nucleotides, for example, as determined by the alignment producing a highest or “optimized” percent identity score.

[0319] Included in the current disclosure are variants of any of the enzymes described herein with one or more conservative amino acid substitutions. Such conservative substitutions can be made in the amino acid sequence of a polypeptide without disrupting the three-dimensional structure or function of the polypeptide. Conservative substitutions can be accomplished by substituting amino acids with similar hydrophobicity, polarity, and R chain length for one another. Additionally, or alternatively, by comparing aligned sequences of homologous proteins from different species, conservative substitutions can be identified by locating amino acid residues that have been mutated between species (e.g., non-conserved residues) without altering the basic functions of the encoded proteins. Such conservatively substituted variants include variants with at least about 20%, at least about 25%, at least about 30%, at least about 35%, at least about 40%, at least about 45%, at least about 50%, at least about 55%, at least about 60%, at least about 65%, at least about 70%, at least about 75%, at least about 80%, at least about 85%, at least about 90%, at least about 91%, at least about 92%, at least about 93%, at least about 94%, at least about 95%, at least about 96%, at least about 97%, at least about 98%, or at least about 99% identity to any one of the reverse transcriptases protein sequences described herein (e.g., MG140, MG146, MG148, MG149, MG151, MG153, MG154, MG155, MG156, MG157, MG158, MG159, MG160, MG163, MG164, MG165, MG166, MG167, MG168, MG169, MG170, MG172, MG173, and MG176 family reverse transcriptases or retrotransposases described herein, or any other family reverse transcriptases or retrotransposases described herein). In some embodiments, such conservatively substituted variants are functional variants. Such functional variants can encompass sequences with substitutions such that the activity of one or more critical active site residues are not disrupted.

[0320] Also included in the current disclosure are variants of any of the enzymes described herein with substitution of one or more catalytic residues to decrease or eliminate activity of the enzyme (e.g., decreased-activity variants). In some embodiments, a decreased activity variant as a protein described herein comprises a disrupting substitution of at least one, at least two, or all three catalytic residues (for example a programmable nuclease MG3 family nickase with a D13A mutation, a H586A mutation, or a N609A mutation).

[0321] Conservative substitution tables providing functionally similar amino acids are available from a variety of references (see, for e.g., Creighton, Proteins: Structures and Molecular Properties (W H Freeman & Co.; 2nd edition (December 1993)). The following eight groups each contain amino acids that are conservative substitutions for one another:
[0322] 1) Alanine (A), Glycine (G);
[0323] 2) Aspartic acid (D), Glutamic acid (E);
[0324] 3) Asparagine (N), Glutamine (Q);
[0325] 4) Arginine (R), Lysine (K);
[0326] 5) Isoleucine (I), Leucine (L), Methionine (M), Valine (V);
[0327] 6) Phenylalanine (F), Tyrosine (Y), Tryptophan (W);
[0328] 7) Serine (S), Threonine (T), and
[0329] 8) Cysteine (C), Methionine (M)

### Gene Editing Systems

[0330] Described herein are gene editing systems, comprising: a) a nickase; b) a guide nucleic acid (e.g., pegRNA or other guide RNA) configured to form a complex with the nickase and to hybridize to a target nucleic acid sequence; and c) a reverse transcriptase having at least about 80% sequence identity to any one of SEQ ID NOs: 161-629, 767-1220, 1959-2522, and 2582-2585 and configured to form a complex with the nickase. Further described herein are gene editing systems, comprising: a) a nuclease; b) a guide nucleic acid (e.g., pegRNA or other guide RNA) configured to form a complex with the nuclease and to hybridize to a target nucleic acid sequence; and c) a reverse transcriptase having at least about 80% sequence identity to any one of SEQ ID NOs: 161-629, 767-1220, 1959-2522, and 2582-2585 and configured to form a complex with the nuclease. Further described herein are gene editing systems, comprising: a) a nickase; b) a guide nucleic acid (e.g., pegRNA) configured to form a complex with the nickase and to hybridize to a target nucleic acid sequence; and c) a reverse transcriptase configured to form a complex with the nickase, the reverse transcriptase having a X₁X₂DD motif, wherein X₁ is F or Y, and wherein when X₁ is Y, X₂ is A, R, N, D, C, E, Q, G, H, I, L, K, M, F, P, S, T, V, W, or Y. Further described herein are gene editing systems, comprising: a) a nuclease; b) a guide nucleic acid (e.g., pegRNA) configured to form a complex with the nuclease and to hybridize to a target nucleic acid sequence; and c) a reverse transcriptase configured to form a complex with the nuclease, the reverse transcriptase having a X₁X₂DD motif, wherein X₁ is F or Y, and wherein when X₁ is Y, X₂ is A, R, N, D, C, E, Q, G, H, I, L, K, M, F, P, S, T, V, W, or Y.

[0331] Gene editing systems as described herein, in some embodiments, comprising a nickase, a nuclease, a reverse transcriptase, or combinations thereof are capable of introduction of site-directed insertions, deletions, and mutations. In some embodiments, the nickase, the nuclease, the reverse transcriptase, or combinations thereof are capable of integration of polynucleotides of large sizes. In some embodiments, the integrated polynucleotide comprises a size of at least about 1 kilobase (kb), 2 kb, 3 kb, 4 kb, 5 kb, 6 kb, 7 kb, 8 kb, 9 kb, 10 kb, or more than 10 kb.

### Reverse Transcriptases

[0332] Reverse transcription is the translation of an RNA template into a complementary DNA. Reverse transcription is performed by enzymes termed reverse transcriptases (RT) that are enzymes with RNA-dependent DNA polymerase activity that create the complementary DNA (cDNA) strand from a RNA template. Some of the RT enzymes also have DNA-dependent DNA polymerase activity to create a double-stranded dsDNA. Reverse transcriptases can be of viral origin (for example HIV, hepatitis B, Moloney murine leukemia virus (MMLV), or avian myeloblastosis virus (AMV)) or bacterial origin (for example group II introns, retrons/retron-like RTs, diversity-generating retroelements (DGRs), Abi-like RTs, CRISPR-associated RTs, and group II-like RTs (G2L)). Reverse transcriptases of eukaryotic origin comprise the telomerase reverse transcriptase that maintains the telomeres of eukaryotic chromosomes. Reverse transcription allows the introduction of site-directed insertions, deletions, and mutations into the cDNA by encoding them in the RNA template.

[0333] In some embodiments, the reverse transcriptase is a viral, prokaryotic, or eukaryotic reverse transcriptase. In some embodiments, the reverse transcriptase comprises a sequence of SEQ ID NOs: 161-629, 767-1220, 1959-2522, and 2582-2585, a variant thereof, or a functional fragment thereof. In some embodiments, the reverse transcriptase comprises a sequence with at least 80%, at least 81%, at least 82%, at least 83%, at least 84%, at least 85%, at least 86%, at least 87%, at least 88%, at least 89%, at least 90%, at least 91%, at least 92%, at least 93%, at least 94%, at least 95%, at least 96%, at least 97%, at least 98%, at least 99%, or 100% sequence identity to any one of SEQ ID NOs: 161-629, 767-1220, 1959-2522, and 2582-2585, a variant thereof, or a functional fragment thereof. In some embodiments, the reverse transcriptase comprises a sequence having at least about 70% identity to any one of SEQ ID NOs: 161-629, 767-1220, 1959-2522, and 2582-2585. In some embodiments, the reverse transcriptase comprises a sequence having at least about 75% identity to any one of SEQ ID NOs: 161-629, 767-1220, 1959-2522, and 2582-2585. In some embodiments, the reverse transcriptase comprises a sequence having at least about 80% identity to any one of SEQ ID NOs: 161-629, 767-1220, 1959-2522, and 2582-2585. In some embodiments, the reverse transcriptase comprises a sequence having at least about 85% identity to any one of SEQ ID NOs: 161-629, 767-1220, 1959-2522, and 2582-2585. In some embodiments, the reverse transcriptase comprises a sequence having at least about 90% identity to any one of SEQ ID NOs: 161-629, 767-1220, 1959-2522, and 2582-2585. In some embodiments, the reverse transcriptase comprises a sequence having at least about 95% identity to any one of SEQ ID NOs: 161-629, 767-1220, 1959-2522, and 2582-2585. In some embodiments, the reverse transcriptase comprises a sequence having at least about 96% identity to any one of SEQ ID NOs: 161-629, 767-1220, 1959-2522, and 2582-2585. In some embodiments, the reverse transcriptase comprises a sequence having at least about 97% identity to any one of SEQ ID NOs: 161-629, 767-1220, 1959-2522, and 2582-2585. In some embodiments, the reverse transcriptase comprises a sequence having at least about 98% identity to any one of SEQ ID NOs: 161-629, 767-1220, 1959-2522, and 2582-2585. In some embodiments, the reverse transcriptase comprises a sequence having at least about 99% identity to any one of SEQ ID NOs: 161-629, 767-1220, 1959-2522, and 2582-2585. In some embodiments, the reverse transcriptase comprises a sequence having 100% identity to any one of SEQ ID NOs: 161-629, 767-1220, 1959-2522, and 2582-2585.

[0334] In some embodiments, the reverse transcriptase is a MG151, MG153, or MG160 family reverse transcriptase. In some embodiments, the reverse transcriptase is a MG140, MG146, MG148, MG149, MG151, MG153, MG154, MG155, MG156, MG157, MG158, MG159, MG160, MG163, MG164, MG165, MG166, MG167, MG168, MG169, MG170, or MG176 family reverse transcriptase. In some embodiments, the reverse transcriptase comprises a sequence with at least 80%, at least 81%, at least 82%, at least 83%, at least 84%, at least 85%, at least 86%, at least 87%, at least 88%, at least 89%, at least 90%, at least 91%, at least 92%, at least 93%, at least 94%, at least 95%, at least 96%, at least 97%, at least 98%, at least 99%, or 100% sequence identity to any one of the MG140, MG146, MG148, MG149, MG151, MG153, MG154, MG155, MG156, MG157, MG158, MG159, MG160, MG163, MG164, MG165, MG166, MG167, MG168, MG169, MG170, MG172, MG173, or MG176 family reverse transcriptase or retrotransposase. In some embodiments, the reverse transcriptase comprises a sequence with at least 80% sequence identity to any one of MG140, MG146, MG148, MG149, MG151, MG153, MG154, MG155, MG156, MG157, MG158, MG159, MG160, MG163, MG164, MG165, MG166, MG167, MG168, MG169, MG170, MG172, MG173, or MG176 family reverse transcriptase or retrotransposase or a variant thereof.

[0335] In some embodiments, the reverse transcriptase is encoded by a nucleic acid sequence having at least 80% sequence identity with the nucleic acid sequence of any one of SEQ ID NOs: 1-75, 702-766, 1221-1243, 1299, 1249-1295, 1300-1304, 1309, 1394-1447, 1592-1593, 1596-1597, 1654, 1691-1720, 1753-1754, 1776-1778, 1780-1783, 1790-1847, and 1856-1858. In some embodiments, the reverse transcriptase is encoded by a nucleic acid sequence having at least 85% sequence identity with the nucleic acid sequence of any one of SEQ ID NOs: 1-75, 702-766, 1221-1243, 1299, 1249-1295, 1300-1304, 1309, 1394-1447, 1592-1593, 1596-1597, 1654, 1691-1720, 1753-1754, 1776-1778, 1780-1783, 1790-1847, and 1856-1858. In some embodiments, the reverse transcriptase is encoded by a nucleic acid sequence having at least 90% sequence identity with the nucleic acid sequence of any one of SEQ ID NOs: 1-75, 702-766, 1221-1243, 1299, 1249-1295, 1300-1304, 1309, 1394-1447, 1592-1593, 1596-1597, 1654, 1691-1720, 1753-1754, 1776-1778, 1780-1783, 1790-1847, and 1856-1858. In some embodiments, the reverse transcriptase is encoded by a nucleic acid sequence having at least 95% sequence identity with the nucleic acid sequence of any one of SEQ ID NOs: 1-75, 702-766, 1221-1243, 1299, 1249-1295, 1300-1304, 1309, 1394-1447, 1592-1593, 1596-1597, 1654, 1691-1720, 1753-1754, 1776-1778, 1780-1783, 1790-1847, and 1856-1858. In some embodiments, the reverse transcriptase is encoded by a nucleic acid sequence having at least 96% sequence identity with the nucleic acid sequence of any one of SEQ ID NOs: 1-75, 702-766, 1221-1243, 1299, 1249-1295, 1300-1304, 1309, 1394-1447, 1592-1593, 1596-1597, 1654, 1691-1720, 1753-1754, 1776-1778, 1780-1783, 1790-1847, and 1856-1858. In some embodiments, the reverse transcriptase is encoded by a nucleic acid sequence having at least 97% sequence identity with the nucleic acid sequence of any one of SEQ ID NOs: 1-75, 702-766, 1221-1243, 1299, 1249-1295, 1300-1304, 1309, 1394-1447, 1592-1593, 1596-1597, 1654, 1691-1720, 1753-1754, 1776-1778, 1780-1783, 1790-1847, and 1856-1858. In some embodiments, the reverse transcriptase is encoded by a nucleic acid sequence having at least 98% sequence identity with the nucleic acid sequence of any one of SEQ ID NOs: 1-75, 702-766, 1221-1243, 1299, 1249-1295, 1300-1304, 1309, 1394-1447, 1592-1593, 1596-1597, 1654, 1691-1720, 1753-1754, 1776-1778, 1780-1783, 1790-1847, and 1856-1858. In some embodiments, the reverse transcriptase is encoded by a nucleic acid sequence having at least 99% sequence identity with the nucleic acid sequence of any one of SEQ ID NOs: 1-75, 702-766, 1221-1243, 1299, 1249-1295, 1300-1304, 1309, 1394-1447, 1592-1593, 1596-1597, 1654, 1691-1720, 1753-1754, 1776-1778, 1780-1783, 1790-1847, and 1856-1858. In some embodiments, the reverse transcriptase is encoded by a nucleic acid sequence of any one of SEQ ID NOs: 1-75, 702-766, 1221-1243, 1299, 1249-1295, 1300-1304, 1309, 1394-1447, 1592-1593, 1596-1597, 1654, 1691-1720, 1753-1754, 1776-1778, 1780-1783, 1790-1847, and 1856-1858.

[0336] Reverse transcriptases typically have an active site core tetrad motif of the amino acid sequence XXDD. In some embodiments, the reverse transcriptase has an active site tetrad motif of X₁X₂DD wherein X₁ is F or Y, and wherein when X₁ is Y, X₂ is A, R, N, D, C, E, Q, G, H, I, L, K, M, F, P, S, T, V, W, or Y. In some embodiments, X₂ is A or I. In some embodiments, the X₁X₂DD motif is YADD (SEQ ID NO: 2572) or YIDD (SEQ ID NO: 2573). In some embodiments, the X₁X₂DD motif is FADD (SEQ ID NO: 2574), FVDD (SEQ ID NO: 2575), FIDD (SEQ ID NO: 2576), or FLDD (SEQ ID NO: 2577). In some embodiments, the reverse transcriptase is isolated. In some embodiments, the reverse transcriptase is a MG140, MG146, MG148, MG149, MG151, MG153, MG154, MG155, MG156, MG157, MG158, MG159, MG160, MG163, MG164, MG165, MG166, MG167, MG168, MG169, MG170, MG172, MG173, or MG176 family reverse transcriptase or retrotransposase and the X₁X₂DD motif is YADD (SEQ ID NO: 2572) or YIDD (SEQ ID NO: 2573). In some embodiments, the reverse transcriptase is isolated. In some embodiments, the reverse transcriptase is a MG140, MG146, MG148, MG149, MG151, MG153, MG154, MG155, MG156, MG157, MG158, MG159, MG160, MG163, MG164, MG165, MG166, MG167, MG168, MG169, MG170, MG172, MG173, or MG176 family reverse transcriptase or retrotransposase and the X₁X₂DD motif is FADD (SEQ ID NO: 2574), FVDD (SEQ ID NO: 2575), FIDD (SEQ ID NO: 2576), or FLDD (SEQ ID NO: 2577).

[0337] In some embodiments, the reverse transcriptase is smaller than 300 amino acids. In some embodiments, the reverse transcriptase is smaller than 250 amino acids. In some embodiments, the reverse transcriptase comprises at least about 50, 75, 100, 125, 150, 175, 200, 225, 250, 275, 300, or more than 300 amino acids. In some embodiments, the reverse transcriptase comprises a range of about 50 to about 300, about 75 to about 300, about 100 to about 300, about 125 to about 300, about 150 to about 300, about 175 to about 300, about 200 to about 300, about 225 to about 300, about 250 to about 300, about 275 to about 300, about 100 to about 300, about 125 to about 300, about 150 to about 300, about 175 to about 300, about 200 to about 300, about 225 to about 300, about 250 to about 300, or about 275 to about 300 amino acids.

[0338] In some embodiments, the reverse transcriptase comprises a processivity of at least about 2-fold more than Moloney Murine Leukemia Virus (MMLV) reverse transcriptase. In some embodiments, the reverse transcriptase comprises a processivity of at least about 2-fold less than Moloney Murine Leukemia Virus (MMLV) reverse transcriptase. In some embodiments, the reverse transcriptase comprises an error rate of less than about 2.5%, 2.0%, 1.5%, 1%, 0.5%, 0.25%, 0.10%, or 0.05%. In some embodiments, the reverse transcriptase comprises an error rate of less than about 2.5%, 2.0%, 1.5%, 1%, 0.5%, 0.25%, 0.10%, or 0.05% as compared to Moloney Murine Leukemia Virus (MMLV) reverse transcriptase. Methods to measure reverse transcriptase processivity are known in the art or are described herein, for example in Example 2.

[0339] In some embodiments, the reverse transcriptase is targetable. Targetable reverse transcriptases are engineered ribonucleoprotein complexes that act as tools for genome editing in cells and organisms. In some embodiments, targetable reverse transcriptases are created by fusing a reverse transcriptase and a site-directed CRISPR nuclease variant that nicks the non-targeting strand of dsDNA, such that a guide RNA or pegRNA comprising a primer binding site (PBS) sequence can find and hybridize with its complementary target sequence to prime the reverse transcriptase reaction using a reverse transcriptase template (RTT) as the template. Two DNA flaps are produced, one containing the desired change encoded in the RTT, and the other with the original sequence; post-equilibration, the change is incorporated into the genomic DNA when the DNA flap with the desired edit is repaired by the cellular host repair machinery.

[0340] In some embodiments, the gene editing system comprises a reverse transcriptase described herein and a nickase. In some embodiments, the gene editing system comprises a reverse transcriptase described herein and a nuclease. In some embodiments, the gene editing system comprises a reverse transcriptase described herein and a modified nuclease. In some embodiments, the gene editing system is programmable. In some embodiments, the modified nuclease is a site-directed nickase.

[0341] In some embodiments, the reverse transcriptase and the nuclease or nickase are linked or tethered. In some embodiments, the gene editing system comprises a fusion protein of a reverse transcriptase and a nuclease or nickase. In some embodiments, the gene editing system comprises a fusion protein comprising a nickase linked to a reverse transcriptase using a linker, wherein the reverse transcriptase comprises at least about 80% sequence identity to any one of SEQ ID NOs: 161-629, 767-1220, 1959-2522, and 2582-2585. In some embodiments, the gene editing system comprises a fusion protein comprising a nuclease linked to a reverse transcriptase using a linker, wherein the reverse transcriptase comprises at least about 80% sequence identity to any one of SEQ ID NOs: 161-629, 767-1220, 1959-2522, and 2582-2585. In some embodiments, the gene editing system comprises a fusion protein comprising a catalytically dead nuclease linked to a reverse transcriptase using a linker, wherein the reverse transcriptase comprises at least about 80% sequence identity to any one of SEQ ID NOs: 161-629, 767-1220, 1959-2522, and 2582-2585.

[0342] In some embodiments, the reverse transcriptase and the nuclease or nickase is linked or fused using a linker. In some embodiments, the linker comprises at least 10, 20, or 30 amino acids. In some embodiments, the linker comprises about 30-35 amino acids. In some embodiments, the linker comprises about 30 amino acids.

[0343] In some embodiments, the linker comprises at least 80% sequence identity to SEQ ID NO: 103. In some embodiments, the linker comprises at least 80% sequence identity to SEQ ID NO: 103. In some embodiments, the linker comprises a sequence having at least about 85% identity to SEQ ID NO: 103. In some embodiments, the linker comprises a sequence having at least about 90% identity to SEQ ID NO: 103. In some embodiments, the linker comprises a sequence having at least about 91% identity to SEQ ID NO: 103. In some embodiments, the linker comprises a sequence having at least about 92% identity to SEQ ID NO: 103. In some embodiments, the linker comprises a sequence having at least about 93% identity to SEQ ID NO: 103. In some embodiments, the linker comprises a sequence having at least about 94% identity to SEQ ID NO: 103. In some embodiments, the linker comprises a sequence having at least about 95% identity to SEQ ID NO: 103. In some embodiments, the linker comprises a sequence having at least about 96% identity to SEQ ID NO: 103. In some embodiments, the linker comprises a sequence having at least about 97% identity to SEQ ID NO: 103. In some embodiments, the linker comprises a sequence having at least about 98% identity to SEQ ID NO: 103. In some embodiments, the linker comprises a sequence having at least about 99% identity to SEQ ID NO: 103. In some embodiments, the linker comprises a sequence having 100% identity to SEQ ID NO: 103.

[0344] Suitable linkers are known in the art and comprise, for example, any one of SEQ ID NOs: 155-160. In some embodiments, the linker comprises at least 80% sequence identity to any one of SEQ ID NOs: 155-160. In some embodiments, linkers joining any of the enzymes or domains described herein comprise one or multiple copies of a sequence having at least 80%, at least 81%, at least 82%, at least 83%, at least 84%, at least 85%, at least 86%, at least 87%, at least 88%, at least 89%, at least 90%, at least 91%, at least 92%, at least 93%, at least 94%, at least 95%, at least 96%, at least 97%, at least 98%, at least 99%, or 100% sequence identity to SGGSSGGSSGSETPGTSESATPESSGGSSGGSSAC (SEQ ID NO: 155), KLGGGAPAVGGGPK(SEQ ID NO: 156), (GGGGS)3(SEQ ID NO: 157), (GGGGS)2EAAAK(GGGGS)2 (SEQ ID NO: 158), (GGGGS)2(EAAAK)2(GGGGS)2 (SEQ ID NO: 159), or SGSETPGTSESATPES (SEQ ID NO: 160), or any other linker sequence described herein. In some embodiments, the linker comprises a sequence having at least about 85% identity to any one of SEQ ID NOs: 155-160. In some embodiments, the linker comprises a sequence having at least about 90% identity to any one of SEQ ID NOs: 155-160. In some embodiments, the linker comprises a sequence having at least about 91% identity to any one of SEQ ID NOs: 155-160. In some embodiments, the linker comprises a sequence having at least about 92% identity to any one of SEQ ID NOs: 155-160. In some embodiments, the linker comprises a sequence having at least about 93% identity to any one of SEQ ID NOs: 155-160. In some embodiments, the linker comprises a sequence having at least about 94% identity to any one of SEQ ID NOs: 155-160. In some embodiments, the linker comprises a sequence having at least about 95% identity to any one of SEQ ID NOs: 155-160. In some embodiments, the linker comprises a sequence having at least about 96% identity to any one of SEQ ID NOs: 155-160. In some embodiments, the linker comprises a sequence having at least about 97% identity to any one of SEQ ID NOs: 155-160. In some embodiments, the linker comprises a sequence having at least about 98% identity to any one of SEQ ID NOs: 155-160. In some embodiments, the linker comprises a sequence having at least about 99% identity to any one of SEQ ID NOs: 155-160. In some embodiments, the linker comprises a sequence having 100% identity to any one of SEQ ID NOs: 155-160.

[0345] In some embodiments, the nickase or nuclease and the reverse transcriptase are not linked.

[0346] In some embodiments, the reverse transcriptase, nuclease, nickase, or fusion protein described herein comprises one or more nuclear localization sequences (NLSs) proximal to an N- or C-terminus of the reverse transcriptase, nuclease, nickase, or fusion protein.

[0347] In some embodiments, the NLS comprises any of the sequences in Table 1 below, or a combination thereof:

TABLE 1
Example NLS Sequences

| | | SEQ |
|---|---|---|
| | NLS amino acid | ID |
| Source | sequence | NO: |
| SV40 | PKKKRKV | 630 |
| nucleoplasmin | KRPAATKKAGQAKKKK | 631 |
| bipartite NLS | | |
| c-myc NLS | PAAKRVKLD | 632 |
| c-myc NLS | RQRRNELKRSP | 633 |
| hRNPA1 M9 NLS | NQSSNFGPMKGGNFGGR | 634 |
| | SSGPYGGGGQYFAKPRN | |
| | QGGY | |
| Importin-alpha | RMRIZFKNKGKDTAELR | 635 |
| IBB domain | RRRVEVSVELRKAKKDE | |
| | QILKRRNV | |
| Myoma T protein | VSRKRPRP | 636 |
| Myoma T protein | PPKKARED | 637 |
| p53 | PQPKKKPL | 638 |
| mouse c-abl IV | SALIKKKKKMAP | 639 |
| influenza virus NS1 | DRLRR | 640 |
| influenza virus NS1 | PKQKKRK | 641 |
| Hepatitis virus | RKLKKKIKKL | 642 |
| delta antigen | | |
| mouse Mx1 protein | REKKKFLKRR | 643 |
| human poly(ADP-ribose) | KRKGDEVDGVDEVAKK | 644 |
| polymerase | KSKK | |
| steroid hormone receptor | RKCLQAGMNLEARKTKK | 645 |
| (human) glucocorticoid | | |

[0348] In some embodiments, the reverse transcriptase comprises a tag. In some embodiments, the nuclease comprises a tag. In some embodiments, the nickase comprises a tag. In some embodiments, the fusion protein comprises a tag. In some embodiments, the tag is an affinity tag. Exemplary affinity tags include, but are not limited to, His-tag, a Flag tag, a Myc-tag, an MBP-tag, and a GST-tag.

[0349] In some embodiments, the reverse transcriptase comprises a protease cleavage site. In some embodiments, the nuclease comprises a protease cleavage site. In some embodiments, the nickase comprises a protease cleavage site. In some embodiments, the fusion protein comprises a protease cleavage site. Exemplary protease cleavage sites include, but are not limited to, a TEV site, a C3 site, a Factor Xa site, and an Enterokinase site.

[0350] In some embodiments, the gene editing system comprises a) a nickase; b) a guide nucleic acid (e.g., pegRNA or other guide RNA); and c) a reverse transcriptase having at least about 80% sequence identity to any one of SEQ ID NOs: 161-629, 767-1220, 1959-2522, and 2582-2585.

[0351] In some embodiments, the gene editing system comprises a) a nuclease; b) a guide nucleic acid (e.g., pegRNA or other guide RNA); and c) a reverse transcriptase having at least about 80% sequence identity to any one of SEQ ID NOs: 161-629, 767-1220, 1959-2522, and 2582-2585.

[0352] In some embodiments, the gene editing system comprises a) a nickase b) a guide nucleic acid (e.g., pegRNA); and c) a reverse transcriptase having a X₁X₂DD motif, wherein X₁ is F or Y, and wherein when X₁ is Y, X₂ is A, R, N, D, C, E, Q, G, H, I, L, K, M, F, P, S, T, V, W, or Y.

[0353] In some embodiments, the gene editing system comprises a) a nuclease; b) a guide nucleic acid (e.g., pegRNA); and c) a reverse transcriptase having a X₁X₂DD motif, wherein X₁ is F or Y, and wherein when X₁ is Y, X₂ is A, R, N, D, C, E, Q, G, H, I, L, K, M, F, P, S, T, V, W, or Y. In some embodiments, the X₂ is A or I. In some embodiments, the X₁X₂DD motif is YADD (SEQ ID NO: 2572) or YIDD (SEQ ID NO: 2573). In some embodiments, the X₁X₂DD motif is FADD (SEQ ID NO: 2574), FVDD (SEQ ID NO: 2575), FIDD (SEQ ID NO: 2576), or FLDD (SEQ ID NO: 2577). In some embodiments, the reverse transcriptase has at least about 80% sequence identity to any one of SEQ ID NOs: 161-629, 767-1220, 1959-2522, and 2582-2585.

[0354] In some embodiments, the nuclease is configured to cleave one strand of a double-stranded target deoxyribonucleic acid (nickase). In some embodiment, the nickase or nuclease is a CRISPR nuclease described herein. In some embodiments, the nickase or nuclease is encoded by a nucleic acid sequence having at least 80%, at least 81%, at least 82%, at least 83%, at least 84%, at least 85%, at least 86%, at least 87%, at least 88%, at least 89%, at least 90%, at least 91%, at least 92%, at least 93%, at least 94%, at least 95%, at least 96%, at least 97%, at least 98%, at least 99%, or 100% sequence identity to any one of SEQ ID NOs: 104 and 1859-1862 or a variant thereof. In some embodiments, the nickase or nuclease is encoded by a nucleic acid sequence having at least about 70% identity to any one of SEQ ID NOs: 104 and 1859-1862. In some embodiments, the nickase or nuclease is encoded by a nucleic acid sequence having at least about 75% identity to any one of SEQ ID NOs: 104 and 1859-1862. In some embodiments, the nickase or nuclease is encoded by a nucleic acid sequence having at least about 80% identity to any one of SEQ ID NOs: 104 and 1859-1862. In some embodiments, the nickase or nuclease is encoded by a nucleic acid sequence having at least about 85% identity to any one of SEQ ID NOs: 104 and 1859-1862. In some embodiments, the nickase or nuclease is encoded by a nucleic acid sequence having at least about 90% identity to any one of SEQ ID NOs: 104 and 1859-1862. In some embodiments, the nickase or nuclease is encoded by a nucleic acid sequence having at least about 95% identity to any one of SEQ ID NOs: 104 and 1859-1862. In some embodiments, the nickase or nuclease is encoded by a nucleic acid sequence having at least about 96% identity to any one of SEQ ID NOs: 104 and 1859-1862. In some embodiments, the nickase or nuclease is encoded by a nucleic acid sequence having at least about 97% identity to any one of SEQ ID NOs: 104 and 1859-1862. In some embodiments, the nickase or nuclease is encoded by a nucleic acid sequence having at least about 98% identity to any one of SEQ ID NOs: 104 and 1859-1862. In some embodiments, the nickase or nuclease is encoded by a nucleic acid sequence having at least about 99% identity to any one of SEQ ID NOs: 104 and 1859-1862. In some embodiments, the nickase or nuclease is encoded by a nucleic acid sequence having 100% identity to any one of SEQ ID NOs: 104 and 1859-1862.

[0355] In some embodiments, the system further comprises a source of Mg²⁺.

[0356] In some embodiments, the nuclease is a modified endonuclease. In some embodiments, the modified endonuclease is a Type II CRISPR endonuclease or a Type V CRISPR endonuclease. In some embodiments, the Type II or Type V CRISPR endonuclease comprises double-stranded cutting activity, nickase activity, or can be catalytically dead. In some embodiments, the CRISPR nuclease has a modification in the HNH domain or in the RuvC domain.

[0357] In some embodiments, the modified endonuclease comprises a sequence having at least 80%, at least 81%, at least 82%, at least 83%, at least 84%, at least 85%, at least 86%, at least 87%, at least 88%, at least 89%, at least 90%, at least 91%, at least 92%, at least 93%, at least 94%, at least 95%, at least 96%, at least 97%, at least 98%, at least 99%, or 100% sequence identity to SEQ ID NOs: 152-154 or a variant thereof. In some embodiments, the modified endonuclease comprises at least about 80% sequence identity to any one of SEQ ID NOs: 152-154. In some embodiments, the modified endonuclease comprises a sequence having at least about 70% identity to any one of SEQ ID NOs: 152-154. In some embodiments, the modified endonuclease comprises a sequence having at least about 75% identity to any one of SEQ ID NOs: 152-154. In some embodiments, the modified endonuclease comprises a sequence having at least about 80% identity to any one of SEQ ID NOs: 152-154. In some embodiments, the modified endonuclease comprises a sequence having at least about 85% identity to any one of SEQ ID NOs: 152-154. In some embodiments, the modified endonuclease comprises a sequence having at least about 90% identity to any one of SEQ ID NOs: 152-154. In some embodiments, the modified endonuclease comprises a sequence having at least about 95% identity to any one of SEQ ID NOs: 152-154. In some embodiments, the modified endonuclease comprises a sequence having at least about 96% identity to any one of SEQ ID NOs: 152-154. In some embodiments, the modified endonuclease comprises a sequence having at least about 97% identity to any one of SEQ ID NOs: 152-154. In some embodiments, the modified endonuclease comprises a sequence having at least about 98% identity to any one of SEQ ID NOs: 152-154. In some embodiments, the modified endonuclease comprises a sequence having at least about 99% identity to any one of SEQ ID NOs: 152-154. In some embodiments, the modified endonuclease comprises a sequence having 100% identity to any one of SEQ ID NOs: 152-154.

[0358] In some embodiments, the modified endonuclease is selected from the group consisting of: spCas9 (H840A), spCas9 (D10A), nMG3-6 (D13A), nMG3-6 (H586A), nMG3-6 (N609A), Cas12a, and MG29-1.

[0359] In some embodiments, the gene editing system comprises a nucleic acid template. The nucleic acid template can be an RNA or a DNA. The nucleic acid template can be 10, 20, 30, 40, 50, 60, 70, 80, 90, 100, 110, 120, 130, 140, 150, 160, 170, 180, 190, or 200 bases long. The nucleic acid template can be 100, 200, 300, 400, 500, 600, 700, 800, 900, or 1000 bases long. In some embodiments, the nucleic acid template has a homology region that is homologous to a site in the genome. In some embodiments, the homology region is 10, 20, 30, 40, 50, 60, 70, 80, 90, 100, 110, 120, 130, 140, 150, 160, 170, 180, 190, or 200 bases long.

[0360] In some embodiments, the gene editing system further comprises a transposase, an integrase, or a homing endonuclease. In some embodiments, the transposase is transposase (Tnp) Tn5, Sleeping Beauty transposase, or a Tn7 transposon. In some embodiments, the gene editing system comprises an enzyme with transposase activity. Additional enzymes with transposase activity include, but are not limited to, retrons and IS200/IS605 transposons.

[0361] In some embodiments, the gene editing system further comprises a retrotransposon of the disclosure. In some embodiments, the retrotransposon is a MG140, MG146, or a MG176 family retrotransposon. In some embodiments, the retrotransposon comprises a sequence having at least 80%, at least 81%, at least 82%, at least 83%, at least 84%, at least 85%, at least 86%, at least 87%, at least 88%, at least 89%, at least 90%, at least 91%, at least 92%, at least 93%, at least 94%, at least 95%, at least 96%, at least 97%, at least 98%, at least 99%, or 100% sequence identity to SEQ ID NOs: 161-629, 767-1220, 1959-2522, and 2582-2585, or a variant thereof.

### CRISPR Nucleases

[0362] Described herein, in some embodiments, are nickases or endonucleases, wherein the nickase or endonuclease is a CRISPR nuclease. In some embodiments, the CRISPR nuclease is a modified nuclease.

[0363] CRISPR systems are RNA-directed nuclease complexes that have been described to function as an adaptive immune system in microbes. In their natural context, CRISPR systems occur in CRISPR (clustered regularly interspaced short palindromic repeats) operons or loci, which generally comprise two parts: (i) an array of short repetitive sequences (30-40 bp) separated by equally short spacer sequences, which encode the RNA-based targeting element; and (ii) ORFs encoding the nuclease polypeptide directed by the RNA-based targeting element alongside accessory proteins/enzymes. Efficient nuclease targeting of a particular target nucleic acid sequence generally requires both (i) complementary hybridization between the first 6-8 nucleic acids of the target (the target seed) and the crRNA guide; and (ii) the presence of a protospacer-adjacent motif (PAM) sequence within a defined vicinity of the target seed (the PAM usually being a sequence not commonly represented within the host genome). Depending on the exact function and organization of the system, CRISPR systems are commonly organized into 2 classes, 5 types, and 16 subtypes based on shared functional characteristics and evolutionary similarity.

[0364] Class 1 CRISPR systems have large, multi-subunit effector complexes, and comprise Types I, III, and IV. Class 2 CRISPR systems generally have single-polypeptide multidomain nuclease effectors, and comprise Types II, V, and VI.

[0365] Type II CRISPR systems are considered the simplest in terms of components. In Type II CRISPR systems, the processing of the CRISPR array into mature crRNAs does not require the presence of a special endonuclease subunit, but rather a small trans-encoded crRNA (tracrRNA) with a region complementary to the array repeat sequence; the tracrRNA interacts with both its corresponding effector nuclease (e.g., Cas9) and the repeat sequence to form a precursor dsRNA structure, which is cleaved by endogenous RNAse III to generate a mature effector enzyme loaded with both tracrRNA and crRNA. Type II nucleases are known as DNA nucleases. Type II nucleases generally exhibit a structure consisting of a RuvC-like endonuclease domain that adopts the RNase H fold with an unrelated HNH nuclease domain inserted within the folds of the RuvC-like nuclease domain. The RuvC-like domain is responsible for the cleavage of the target (e.g., crRNA complementary) DNA strand, while the HNH domain is responsible for cleavage of the displaced DNA strand. Exemplary CRISPR Cas9 proteins include, but are not limited to, Cas9 from Streptococcus pyogene—(UniProtKB—Q99ZW2 (CAS9 STRP1)), Streptococcus thermophilu—(UniProtKB—G3ECR1 (CAS9 STRTR)), Staphylococcus aureu—(UniProtKB—J7RUA5 (CAS9 STAAU), Campylobacter jejun—(UniProtKB—Q0P897 (CAS9 CAMJE)), Campylobacter lar—(UniProtKB—A0A0A8HTA3 (A0A0A8HTA3 CAMLA), and Helicobacter canadensi—(UniProtKB—C5ZYI3 (C5ZYI3 9HELI)), Francisella tularensis subsp. Novicid—(UniProtKB—A0Q5Y3 (CAS9_FRATN). Additional Type II nucleases are described in International Patent Application Publication WO 2021/226363, WO 2022/159758, and WO 2022/056324.

[0366] Type V CRISPR systems are characterized by a nuclease effector (e.g., Cas12) structure similar to that of Type II effectors, comprising a RuvC-like domain. Similar to Type II, most (but not all) Type V CRISPR systems use a tracrRNA to process pre-crRNAs into mature crRNAs; however, unlike Type II systems which requires RNAse III to cleave the pre-crRNA into multiple crRNAs, Type V systems are capable of using the effector nuclease itself to cleave pre-crRNAs. Like Type II CRISPR systems, Type V CRISPR systems are known as DNA nucleases. Unlike Type II CRISPR systems, some Type V enzymes (e.g., Cas12a) appear to have a robust single-stranded nonspecific deoxyribonuclease activity that is activated by the first crRNA-directed cleavage of a double-stranded target sequence.

[0367] In some embodiments, the nuclease or nickase is a CRISPR nuclease. In some embodiments, the CRISPR nuclease is a Class 2 Type II SpCas9 or a Class 2 Type V-A Cas12a (previously Cpf1). In some embodiments, the Type V-A nuclease has a guide RNA of 42-44 nucleotides compared with approximately 100 nt for SpCas9. In some embodiments, the Type V-A nuclease results in staggered cut sites. In some embodiments, the Type V-A nuclease results in staggered cut sites to facilitate directed repair pathways, such as microhomology-dependent targeted integration (MITI).

[0368] The most commonly used Type V-A enzymes require a 5′ protospacer adjacent motif (PAM) next to the chosen target site. 5′-TTTV-3′ for Lachnospiraceae bacterium ND2006 LbCas12a and Acidaminococcus sp. AsCas12a; and 5′-TTV-3′ for Francisella novicida FnCas12a. In some embodiments the PAM sequence is YTV, YYN, or TTN. Additional Type II nucleases are described in International Patent Application Publication WO 2021/226363.

[0369] In some embodiments, the nickase is a modified nuclease. In some embodiments, the modified endonuclease is a Type II CRISPR endonuclease. In some embodiments, the modified endonuclease is a Type II CRISPR endonuclease or a Type V endonuclease. In some embodiments, the Type II CRISPR endonuclease or the Type V endonuclease has nickase activity.

[0370] In some embodiments, the modified endonuclease is selected from the group consisting of: spCas9 (H840A), spCas9 (D10A), nMG3-6 (D13A), nMG3-6 (H586A), nMG3-6 (N609A), Cas12a, and MG29-1. In some embodiments, the modified endonuclease comprises at least about 80% sequence identity to any one of SEQ ID NOs: 152-154. In some embodiments, the nuclease comprises a sequence with at least 80%, at least 81%, at least 82%, at least 83%, at least 84%, at least 85%, at least 86%, at least 87%, at least 88%, at least 89%, at least 90%, at least 91%, at least 92%, at least 93%, at least 94%, at least 95%, at least 96%, at least 97%, at least 98%, at least 99%, or 100% sequence identity to any one of SEQ ID NOs: 152-154 or a variant thereof. In some embodiments, the modified endonuclease comprises a sequence having at least about 70% identity to any one of SEQ ID NOs: 152-154. In some embodiments, the modified endonuclease comprises a sequence having at least about 75% identity to any one of SEQ ID NOs: 152-154. In some embodiments, the modified endonuclease comprises a sequence having at least about 80% identity to any one of SEQ ID NOs: 152-154. In some embodiments, the modified endonuclease comprises a sequence having at least about 85% identity to any one of SEQ ID NOs: 152-154. In some embodiments, the modified endonuclease comprises a sequence having at least about 90% identity to any one of SEQ ID NOs: 152-154. In some embodiments, the modified endonuclease comprises a sequence having at least about 95% identity to any one of SEQ ID NOs: 152-154. In some embodiments, the modified endonuclease comprises a sequence having at least about 96% identity to any one of SEQ ID NOs: 152-154. In some embodiments, the modified endonuclease comprises a sequence having at least about 97% identity to any one of SEQ ID NOs: 152-154. In some embodiments, the modified endonuclease comprises a sequence having at least about 98% identity to any one of SEQ ID NOs: 152-154. In some embodiments, the modified endonuclease comprises a sequence having at least about 99% identity to any one of SEQ ID NOs: 152-154. In some embodiments, the modified endonuclease comprises a sequence having 100% identity to any one of SEQ ID NOs: 152-154.

[0371] In some embodiments, the nuclease comprises a sequence with at least 80%, at least 81%, at least 82%, at least 83%, at least 84%, at least 85%, at least 86%, at least 87%, at least 88%, at least 89%, at least 90%, at least 91%, at least 92%, at least 93%, at least 94%, at least 95%, at least 96%, at least 97%, at least 98%, at least 99%, or 100% sequence identity to SEQ ID NOs: 646 or SEQ ID NO: 647 or a variant thereof. In some embodiments, the nuclease comprises a sequence having at least about 70% identity to SEQ ID NO: 646 or SEQ ID NO: 647. In some embodiments, the nuclease comprises a sequence having at least about 75% identity to SEQ ID NO: 646 or SEQ ID NO: 647. In some embodiments, the nuclease comprises a sequence having at least about 80% identity to SEQ ID NO: 646 or SEQ ID NO: 647. In some embodiments, the nuclease comprises a sequence having at least about 85% identity to SEQ ID NO: 646 or SEQ ID NO: 647. In some embodiments, the nuclease comprises a sequence having at least about 90% identity to SEQ ID NO: 646 or SEQ ID NO: 647. In some embodiments, the nuclease comprises a sequence having at least about 95% identity to SEQ ID NO: 646 or SEQ ID NO: 647. In some embodiments, the nuclease comprises a sequence having at least about 96% identity to SEQ ID NO: 646 or SEQ ID NO: 647. In some embodiments, the nuclease comprises a sequence having at least about 97% identity to SEQ ID NO: 646 or SEQ ID NO: 647. In some embodiments, the nuclease comprises a sequence having at least about 98% identity to SEQ ID NO: 646 or SEQ ID NO: 647. In some embodiments, the nuclease comprises a sequence having at least about 99% identity to SEQ ID NO: 646 or SEQ ID NO: 647. In some embodiments, the nuclease comprises a sequence having 100% identity to SEQ ID NO: 646 or SEQ ID NO: 647.

[0372] In some embodiments, the nuclease is encoded by a nucleic acid sequence having at least 80% sequence identity with the nucleic acid sequence of SEQ ID NO: 653. In some embodiments, the nuclease is encoded by a nucleic acid sequence having at least 85% sequence identity with the nucleic acid sequence of SEQ ID NO: 653. In some embodiments, the nuclease is encoded by a nucleic acid sequence having at least 90% sequence identity with the nucleic acid sequence of SEQ ID NO: 653. In some embodiments, the nuclease is encoded by a nucleic acid sequence having at least 95% sequence identity with the nucleic acid sequence of SEQ ID NO: 653. In some embodiments, the nuclease is encoded by a nucleic acid sequence having at least 96% sequence identity with the nucleic acid sequence of SEQ ID NO: 653. In some embodiments, the nuclease is encoded by a nucleic acid sequence having at least 97% sequence identity with the nucleic acid sequence of SEQ ID NO: 653. In some embodiments, the nuclease is encoded by a nucleic acid sequence having at least 98% sequence identity with the nucleic acid sequence of SEQ ID NO: 653. In some embodiments, the nuclease is encoded by a nucleic acid sequence having at least 99% sequence identity with the nucleic acid sequence of SEQ ID NO: 653. In some embodiments, the nuclease is encoded by a nucleic acid sequence of SEQ ID NO: 653.

[0373] In some embodiments, the RuvC domain lacks nuclease activity. In some embodiments, the HNH domain lack nuclease activity. In some embodiments, the modified nuclease has a modification corresponding to position H840A in S. pyogenes Cas9. In some embodiments, the modified nuclease has a modification corresponding to position D10A in S. pyogenes Cas9. In some embodiments, the modified nuclease has a modification corresponding to position D13A in MG3-6 (SEQ ID NO: 646) termed nMG3-6 (D13A) (SEQ ID NO: 152). In some embodiments, the modified nuclease has a modification corresponding to position H586A in MG3-6 (SEQ ID NO: 646) termed nMG3-6 (H586A) (SEQ ID NO: 153). In some embodiments, the modified nuclease has a modification corresponding to position N609A in MG3-6 (SEQ ID NO: 646) termed nMG3-6 (N609A) (SEQ ID NO: 154). In some embodiments, the modified nuclease is configured to cleave one strand of a double-stranded target deoxyribonucleic acid. In some embodiments, the ribonucleic acid sequence configured to bind to the endonuclease comprises a tracr sequence.

[0374] In some embodiments, the nickase or nuclease comprises one or more nuclear localization sequences (NLSs) proximal to an N- or C-terminus of the nickase or nuclease.

[0375] In some embodiments, the NLS comprises any of the sequences in Table 1 above, or a combination thereof

### Guide Nucleic Acids

[0376] In some embodiments, provided herein are guide nucleic acids such as guide RNAs (gRNAs) or prime editing guide RNAs (pegRNAs). In a polynucleotide when referring to a T, a T means U (Uracil) in RNA and T (Thymine) in DNA.

[0377] Prime editing enables the installation of virtually any combination of point mutations, small insertions, or small deletions in the genome of living cells. A prime editing guide RNA (pegRNA) directs the prime editor protein to the targeted locus and also encodes the desired edit.

[0378] In some embodiments, the guide RNA targets a gene in a cell. In some embodiments, the guide RNA targets a gene in a mammalian cell. In some embodiments, the target gene is TRAC, VEGFA, AAVS1, B2M, CD5, or CD38. Exemplary guide RNAs are shown in SEQ ID NOs: 76-99, 109-140, 149, 656-697, 1310-1315, 1317-1341, 1451-1474, 1479-1492, 1564, 1568-1576, 1598-1620, 1656-1681, 1683-1690, 1722-1749, 1755-1774, 1784-1786, 1848-1855, and 1863-1910.

[0379] In some embodiments, the guide RNA is encoded by any one of the nucleic acid sequences of SEQ ID NOs: 76-99, 109-140, 149, 656-697, 1310-1315, 1317-1341, 1451-1474, 1479-1492, 1564, 1568-1576, 1598-1620, 1656-1681, 1683-1690, 1722-1749, 1755-1774, 1784-1786, 1848-1855, and 1863-1910, a sequence having at least about 80%, 85%, 90%, 95%, 97%, 98%, or 99% sequence identity to any one of the nucleic acid sequences of SEQ ID NOs: 76-99, 109-140, 149, 656-697, 1310-1315, 1317-1341, 1451-1474, 1479-1492, 1564, 1568-1576, 1598-1620, 1656-1681, 1683-1690, 1722-1749, 1755-1774, 1784-1786, 1848-1855, and 1863-1910, or a reverse complement thereof. In some embodiments, the guide RNA is encoded by a sequence having at least about 80% sequence identity to any one of the nucleic acid sequences of SEQ ID NOs: 76-99, 109-140, 149, 656-697, 1310-1315, 1317-1341, 1451-1474, 1479-1492, 1564, 1568-1576, 1598-1620, 1656-1681, 1683-1690, 1722-1749, 1755-1774, 1784-1786, 1848-1855, and 1863-1910 or a reverse complement thereof. In some embodiments, the guide RNA is encoded by a sequence having at least about 85% sequence identity to any one of the nucleic acid sequences of SEQ ID NOs: 76-99, 109-140, 149, 656-697, 1310-1315, 1317-1341, 1451-1474, 1479-1492, 1564, 1568-1576, 1598-1620, 1656-1681, 1683-1690, 1722-1749, 1755-1774, 1784-1786, 1848-1855, and 1863-1910 or a reverse complement thereof. In some embodiments, the guide RNA is encoded by a sequence having at least about 90% sequence identity to any one of the nucleic acid sequences of SEQ ID NOs: 76-99, 109-140, 149, 656-697, 1310-1315, 1317-1341, 1451-1474, 1479-1492, 1564, 1568-1576, 1598-1620, 1656-1681, 1683-1690, 1722-1749, 1755-1774, 1784-1786, 1848-1855, and 1863-1910 or a reverse complement thereof. In some embodiments, the guide RNA is encoded by a sequence having at least about 95% sequence identity to any one of the nucleic acid sequences of SEQ ID NOs: 76-99, 109-140, 149, 656-697, 1310-1315, 1317-1341, 1451-1474, 1479-1492, 1564, 1568-1576, 1598-1620, 1656-1681, 1683-1690, 1722-1749, 1755-1774, 1784-1786, 1848-1855, and 1863-1910 or a reverse complement thereof. In some embodiments, the guide RNA is encoded by a sequence having at least about 97% sequence identity to any one of the nucleic acid sequences of SEQ ID NOs: 76-99, 109-140, 149, 656-697, 1310-1315, 1317-1341, 1451-1474, 1479-1492, 1564, 1568-1576, 1598-1620, 1656-1681, 1683-1690, 1722-1749, 1755-1774, 1784-1786, 1848-1855, and 1863-1910 or a reverse complement thereof. In some embodiments, the guide RNA is encoded by a sequence having at least about 98% sequence identity to any one of the nucleic acid sequences of SEQ ID NOs: 76-99, 109-140, 149, 656-697, 1310-1315, 1317-1341, 1451-1474, 1479-1492, 1564, 1568-1576, 1598-1620, 1656-1681, 1683-1690, 1722-1749, 1755-1774, 1784-1786, 1848-1855, and 1863-1910 or a reverse complement thereof. In some embodiments, the guide RNA is encoded by a sequence having at least about 99% sequence identity to any one of the nucleic acid sequences of SEQ ID NOs: 76-99, 109-140, 149, 656-697, 1310-1315, 1317-1341, 1451-1474, 1479-1492, 1564, 1568-1576, 1598-1620, 1656-1681, 1683-1690, 1722-1749, 1755-1774, 1784-1786, 1848-1855, and 1863-1910 or a reverse complement thereof. In some embodiments, the guide RNA is encoded by a sequence according to any one of the nucleic acid sequences of SEQ ID NOs: 76-99, 109-140, 149, 656-697, 1310-1315, 1317-1341, 1451-1474, 1479-1492, 1564, 1568-1576, 1598-1620, 1656-1681, 1683-1690, 1722-1749, 1755-1774, 1784-1786, 1848-1855, and 1863-1910 or a reverse complement thereof.

[0380] In some embodiments, the one or more guide RNAs are encoded by a sequence comprising at least about 80%, 85%, 90%, 95%, 97%, 98%, or 99% sequence identity to any one of the nucleic acid sequences of SEQ ID NOs: 76-99, 109-140, 149, 656-697, 1310-1315, 1317-1341, 1451-1474, 1479-1492, 1564, 1568-1576, 1598-1620, 1656-1681, 1683-1690, 1722-1749, 1755-1774, 1784-1786, 1848-1855, and 1863-1910 or a reverse complement thereof. In some embodiments, the one or more guide RNAs are encoded by a sequence comprising at least about 80% sequence identity to any one of the nucleic acid sequences of SEQ ID NOs: 76-99, 109-140, 149, 656-697, 1310-1315, 1317-1341, 1451-1474, 1479-1492, 1564, 1568-1576, 1598-1620, 1656-1681, 1683-1690, 1722-1749, 1755-1774, 1784-1786, 1848-1855, and 1863-1910 or a reverse complement thereof. In some embodiments, the one or more guide RNAs are encoded by a sequence comprising at least about 85% sequence identity to any one of the nucleic acid sequences of SEQ ID NOs: 76-99, 109-140, 149, 656-697, 1310-1315, 1317-1341, 1451-1474, 1479-1492, 1564, 1568-1576, 1598-1620, 1656-1681, 1683-1690, 1722-1749, 1755-1774, 1784-1786, 1848-1855, and 1863-1910 or a reverse complement thereof. In some embodiments, the one or more guide RNAs are encoded by a sequence comprising at least about 90% sequence identity to any one of the nucleic acid sequences of SEQ ID NOs: 76-99, 109-140, 149, 656-697, 1310-1315, 1317-1341, 1451-1474, 1479-1492, 1564, 1568-1576, 1598-1620, 1656-1681, 1683-1690, 1722-1749, 1755-1774, 1784-1786, 1848-1855, and 1863-1910 or a reverse complement thereof. In some embodiments, the one or more guide RNAs are encoded by a sequence comprising at least about 95% sequence identity to any one of the nucleic acid sequences of SEQ ID NOs: 76-99, 109-140, 149, 656-697, 1310-1315, 1317-1341, 1451-1474, 1479-1492, 1564, 1568-1576, 1598-1620, 1656-1681, 1683-1690, 1722-1749, 1755-1774, 1784-1786, 1848-1855, and 1863-1910 or a reverse complement thereof. In some embodiments, the one or more guide RNAs are encoded by a sequence comprising at least about 97% sequence identity to any one of the nucleic acid sequences of SEQ ID NOs: 76-99, 109-140, 149, 656-697, 1310-1315, 1317-1341, 1451-1474, 1479-1492, 1564, 1568-1576, 1598-1620, 1656-1681, 1683-1690, 1722-1749, 1755-1774, 1784-1786, 1848-1855, and 1863-1910 or a reverse complement thereof. In some embodiments, the one or more guide RNAs are encoded by a sequence comprising at least about 98% sequence identity to any one of the nucleic acid sequences of SEQ ID NOs: 76-99, 109-140, 149, 656-697, 1310-1315, 1317-1341, 1451-1474, 1479-1492, 1564, 1568-1576, 1598-1620, 1656-1681, 1683-1690, 1722-1749, 1755-1774, 1784-1786, 1848-1855, and 1863-1910 or a reverse complement thereof. In some embodiments, the one or more guide RNAs are encoded by a sequence comprising at least about 99% sequence identity to any one of the nucleic acid sequences of SEQ ID NOs: 76-99, 109-140, 149, 656-697, 1310-1315, 1317-1341, 1451-1474, 1479-1492, 1564, 1568-1576, 1598-1620, 1656-1681, 1683-1690, 1722-1749, 1755-1774, 1784-1786, 1848-1855, and 1863-1910 or a reverse complement thereof. In some embodiments, the guide RNA is encoded by a sequence according to any one of the nucleic acid sequences of SEQ ID NOs: 76-99, 109-140, 149, 656-697, 1310-1315, 1317-1341, 1451-1474, 1479-1492, 1564, 1568-1576, 1598-1620, 1656-1681, 1683-1690, 1722-1749, 1755-1774, 1784-1786, 1848-1855, and 1863-1910 or a reverse complement thereof, or a reverse complement thereof.

[0381] In some embodiments, guide RNAs or pegRNAs comprise various structural elements including but not limited to: a spacer sequence which binds to the protospacer sequence (target sequence), a crRNA, and an optional tracrRNA. In some embodiments, the genome editing system comprises a CRISPR guide RNA. In some embodiments, the guide RNA comprises a crRNA comprising a spacer sequence. In some embodiments, the guide RNA additionally comprises a tracrRNA or a modified tracrRNA.

[0382] In some embodiments, the compositions and methods provided herein comprise one or more guide RNAs. In some embodiments, the guide RNA comprises a sense sequence. In some embodiments, the guide RNA comprises an anti-sense sequence. In some embodiments, the guide RNA comprises nucleotide sequences other than the region complementary to or substantially complementary to a region of a target sequence. For example, a guide RNA is part or considered part of a crRNA, or is comprised in a crRNA, e.g., a crRNA:tracrRNA chimera.

[0383] In some embodiments, the guide RNA (e.g., gRNA) comprises synthetic nucleotides or modified nucleotides. In some embodiments, the guide RNA comprises one or more inter-nucleoside linkers modified from the natural phosphodiester. In some embodiments, all of the inter-nucleoside linkers of the guide RNA, or contiguous nucleotide sequence thereof, are modified. For example, in some embodiments, the inter nucleoside linkage comprises Sulphur (S), such as a phosphorothioate inter-nucleoside linkage.

[0384] In some embodiments, the guide RNA (e.g., gRNA) comprises modifications to a ribose sugar or nucleobase. In some embodiments, the guide RNA comprises one or more nucleosides comprising a modified sugar moiety, wherein the modified sugar moiety is a modification of the sugar moiety when compared to the ribose sugar moiety found in deoxyribose nucleic acid (DNA) and RNA. In some embodiments, the modification is within the ribose ring structure. Exemplary modifications include, but are not limited to, replacement with a hexose ring (HNA), a bicyclic ring having a biradical bridge between the C2 and C4 carbons on the ribose ring (e.g., locked nucleic acids (LNA)), or an unlinked ribose ring which typically lacks a bond between the C2 and C3 carbons (e.g., UNA). In some embodiments, the sugar-modified nucleosides comprise bicyclohexose nucleic acids or tricyclic nucleic acids. In some embodiments, the modified nucleosides comprise nucleosides where the sugar moiety is replaced with a non-sugar moiety, for example peptide nucleic acids (PNA) or morpholino nucleic acids.

[0385] In some embodiments, the guide RNA comprises one or more modified sugars. In some embodiments, the sugar modifications comprise modifications made by altering the substituent groups on the ribose ring to groups other than hydrogen, or the 2′-OH group naturally found in DNA and RNA nucleosides. In some embodiments, substituents are introduced at the 2′, 3′, 4′, 5′ positions, or combinations thereof. In some embodiments, nucleosides with modified sugar moieties comprise 2′ modified nucleosides, e.g., 2′ substituted nucleosides. A 2′ sugar modified nucleoside, in some embodiments, is a nucleoside that has a substituent other than H or —OH at the substitute (2′ substituted nucleoside) or comprises a 2′ linked biradical, and comprises 2′ substituted nucleosides and LNA (2′-4′ biradical bridged) nucleosides. Examples of 2′-substituted modified nucleosides comprise, but are not limited to, 2′-O-alkyl-RNA, 2′-O-methyl-RNA, 2′-alkoxy-RNA, 2′-O-methoxyethyl-RNA (MOE), 2′-amino-DNA, 2′-Fluoro-RNA, and 2′-F-ANA nucleoside. In some embodiments, the modification in the ribose group comprises a modification at the 2′ position of the ribose group. In some embodiments, the modification at the 2′ position of the ribose group is selected from the group consisting of 2′-O-methyl, 2′-fluoro, 2′-deoxy, and 2′-O-(2-methoxyethyl).

[0386] In some embodiments, the guide RNA comprises one or more modified sugars. In some embodiments, the guide RNA comprises only modified sugars. In certain embodiments, the guide RNA comprises greater than about 10%, 25%, 50%, 75%, or 90% modified sugars. In some embodiments, the modified sugar is a bicyclic sugar. In some embodiments, the modified sugar comprises a 2′-O-methoxyethyl group. In some embodiments, the guide RNA comprises both inter-nucleoside linker modifications and nucleoside modifications.

[0387] In some embodiments, the guide RNA comprises about 15 nucleotides to about 28 nucleotides. In some embodiments, the guide RNA comprises at least about 15 nucleotides. In some embodiments, the guide RNA comprises at most about 28 nucleotides. In some embodiments, the guide RNA comprises about 15 nucleotides to about 16 nucleotides, about 15 nucleotides to about 17 nucleotides, about 15 nucleotides to about 18 nucleotides, about 15 nucleotides to about 19 nucleotides, about 15 nucleotides to about 20 nucleotides, about 15 nucleotides to about 21 nucleotides, about 15 nucleotides to about 22 nucleotides, about 15 nucleotides to about 23 nucleotides, about 15 nucleotides to about 24 nucleotides, about 15 nucleotides to about 25 nucleotides, about 15 nucleotides to about 28 nucleotides, about 16 nucleotides to about 17 nucleotides, about 16 nucleotides to about 18 nucleotides, about 16 nucleotides to about 19 nucleotides, about 16 nucleotides to about 20 nucleotides, about 16 nucleotides to about 21 nucleotides, about 16 nucleotides to about 22 nucleotides, about 16 nucleotides to about 23 nucleotides, about 16 nucleotides to about 24 nucleotides, about 16 nucleotides to about 25 nucleotides, about 16 nucleotides to about 28 nucleotides, about 17 nucleotides to about 18 nucleotides, about 17 nucleotides to about 19 nucleotides, about 17 nucleotides to about 20 nucleotides, about 17 nucleotides to about 21 nucleotides, about 17 nucleotides to about 22 nucleotides, about 17 nucleotides to about 23 nucleotides, about 17 nucleotides to about 24 nucleotides, about 17 nucleotides to about 25 nucleotides, about 17 nucleotides to about 28 nucleotides, about 18 nucleotides to about 19 nucleotides, about 18 nucleotides to about 20 nucleotides, about 18 nucleotides to about 21 nucleotides, about 18 nucleotides to about 22 nucleotides, about 18 nucleotides to about 23 nucleotides, about 18 nucleotides to about 24 nucleotides, about 18 nucleotides to about 25 nucleotides, about 18 nucleotides to about 28 nucleotides, about 19 nucleotides to about 20 nucleotides, about 19 nucleotides to about 21 nucleotides, about 19 nucleotides to about 22 nucleotides, about 19 nucleotides to about 23 nucleotides, about 19 nucleotides to about 24 nucleotides, about 19 nucleotides to about 25 nucleotides, about 19 nucleotides to about 28 nucleotides, about 20 nucleotides to about 21 nucleotides, about 20 nucleotides to about 22 nucleotides, about 20 nucleotides to about 23 nucleotides, about 20 nucleotides to about 24 nucleotides, about 20 nucleotides to about 25 nucleotides, about 20 nucleotides to about 28 nucleotides, about 21 nucleotides to about 22 nucleotides, about 21 nucleotides to about 23 nucleotides, about 21 nucleotides to about 24 nucleotides, about 21 nucleotides to about 25 nucleotides, about 21 nucleotides to about 28 nucleotides, about 22 nucleotides to about 23 nucleotides, about 22 nucleotides to about 24 nucleotides, about 22 nucleotides to about 25 nucleotides, about 22 nucleotides to about 28 nucleotides, about 23 nucleotides to about 24 nucleotides, about 23 nucleotides to about 25 nucleotides, about 23 nucleotides to about 28 nucleotides, about 24 nucleotides to about 25 nucleotides, about 24 nucleotides to about 28 nucleotides, or about 25 nucleotides to about 28 nucleotides. In some embodiments, the guide RNA comprises about 15 nucleotides, about 16 nucleotides, about 17 nucleotides, about 18 nucleotides, about 19 nucleotides, about 20 nucleotides, about 21 nucleotides, about 22 nucleotides, about 23 nucleotides, about 24 nucleotides, about 25 nucleotides, or about 28 nucleotides.

[0388] In some embodiments, the guide nucleic acid further comprises a primer binding site (PBS). In some embodiments, the primer binding site is on a 3′ of the guide nucleic acid. In some embodiments, the primer binding site comprises at least 2, 4, 6, 8, 10, 13, 16, 20, 24, 28, 32, 36, 40, 45, 50, 55, 60, or 65 nucleotides. In some embodiments, the primer binding site comprises less than 2, 4, 6, or 8, nucleotides.

[0389] In some embodiments, the guide nucleic acid further comprises a reverse transcriptase template (RTT). In some embodiments, a base in the RTT comprises a bulky modification selected from the group of complex sugars, complex amino groups, and/or other modifications compatible with RNA. In some embodiments, the RTT is fused to the guide RNA. In some embodiments, the guide nucleic acid further comprises a homology sequence that is complementary to a region in the non-edited DNA strand. In some embodiments, the guide nucleic acid comprises a nucleic acid template. In some embodiments, the RTT has a length of at least about 10, 20, 30, 40, 50, 60, 70, 80, 90, or 100 nucleotides. In some the RTT has a length of at least about 100, 200, 300, 400, 500, 600, 700, 800, 900, or 1000 nucleotides. In some embodiments, the RTT has a length of at least about 1000, 2000, 3000, 4000, or 5000 nucleotides. In some embodiments, the RTT has a length between about 10 and about 20, 30, 40, 50, 60, 70, 80, 90, 100, 120, 140, 160, 180, 200, or more than 200 nucleotides. In some embodiments, the RTT has a length between about 20 and about 30, 40, 50, 60, 70, 80, 90, 100, 120, 140, 160, 180, 200, or more than 200 nucleotides. In some embodiments, the RTT has a length between about 30 and about 40, 50, 60, 70, 80, 90, 100, 120, 140, 160, 180, 200, or more than 200 nucleotides. In some embodiments, the RTT has a length between about 40 and about 50, 60, 70, 80, 90, 100, 120, 140, 160, 180, 200, or more than 200 nucleotides. In some embodiments, the RTT has a length between about 50 and about 60, 70, 80, 90, 100, 120, 140, 160, 180, 200, or more than 200 nucleotides. In some embodiments, the RTT has a length between about 60 and about 70, 80, 90, 100, 120, 140, 160, 180, 200, or more than 200 nucleotides. In some embodiments, the RTT has a length between about 70 and about 80, 90, 100, 120, 140, 160, 180, 200, or more than 200 nucleotides. In some embodiments, the RTT has a length between about 80 and about 100, 120, 140, 160, 180, 200, or more than 200 nucleotides. In some embodiments, the RTT has a length between about 100 and about 120, 140, 160, 180, 200, or more than 200 nucleotides. In some embodiments, the RTT has a length between about 100 and about 4000 nucleotides. In some embodiments, the RTT has a length between about 100 and about 200, 300, 400, 500, 600, 700, 800, 900, 1000, 1500, 2000, 2500, 3000, 3500, or 4000 nucleotides. In some embodiments, the RTT has a length between about 500 and about 600, 700, 800, 900, 1000, 1500, 2000, 2500, 3000, 3500, or 4000 nucleotides. In some embodiments, the RTT has a length between about 1000 and about 1500, 2000, 2500, 3000, 3500, or 4000 nucleotides. In some embodiments, the RTT has a length between about 2000 and about 2500, 3000, 3500, or 4000 nucleotides. In some embodiments, the RTT has a length between about 3000 and about 3500, or 4000 nucleotides.

[0390] Methods of making guide nucleic acids are known in the art. For example, guide RNAs and pegRNAs, as well as and modified guide RNAs and pegRNAs, can be chemically synthesized. Additionally, nucleic sequences encoding guide nucleic acids can be cloned into a vector and transcribed from the vector in vitro or in vivo using RNA polymerases.

### Cells

[0391] Described herein, in certain embodiments, is a cell comprising gene editing systems described herein.

[0392] In some embodiments, the cell is a eukaryotic cell (e.g., a plant cell, an animal cell, a protist cell, or a fungi cell), a mammalian cell (a Chinese hamster ovary (CHO) cell, baby hamster kidney (BHK), human embryo kidney (HEK), mouse myeloma (NS0), or human retinal cells), an immortalized cell (e.g., a HeLa cell, a COS cell, a HEK-293T cell, a MDCK cell, a 3T3 cell, a PC12 cell, a Huh7 cell, a HepG2 cell, a K562 cell, a N2a cell, or a SY5Y cell), an insect cell (e.g., a Spodoptera frugiperda cell, a Trichoplusia ni cell, a Drosophila melanogaster cell, a S2 cell, or a Heliothis virescens cell), a yeast cell (e.g., a Saccharomyces cerevisiae cell, a Cryptococcus cell, or a Candida cell), a plant cell (e.g., a parenchyma cell, a collenchyma cell, or a sclerenchyma cell), a fungal cell (e.g., a Saccharomyces cerevisiae cell, a Cryptococcus cell, or a Candida cell), or a prokaryotic cell (e.g., a E. coli cell, a streptococcus bacterium cell, a streptomyces soil bacteria cell, or an archaea cell). In some embodiments, the cell is a eukaryotic cell. In some embodiments, the cell is a mammalian cell. In some embodiments, the cell is an immortalized cell. In some embodiments, the cell is an insect cell. In some embodiments, the cell is a yeast cell. In some embodiments, the cell is a plant cell. In some embodiments, the cell is a fungal cell. In some embodiments, the cell is a prokaryotic cell.

[0393] In some embodiments, the cell is an A549, HEK-293, HEK-293T, BHK, CHO, HeLa, MRC5, Sf9, Cos-1, Cos-7, Vero, BSC 1, BSC 40, BMT 10, WI38, HeLa, Saos, C2C12, L cell, HT1080, HepG2, Huh7, K562, a primary cell, or derivative thereof.

[0394] In some embodiments, the present disclosure provides a cell comprising a vector or a nucleic acid described herein. In some embodiments, the cell expresses a gene editing system or parts thereof. In some embodiments, the cell is a human cell. In some embodiments, the genome is edited ex vivo. In some embodiments, the genome is edited in vivo.

### Delivery and Vectors

[0395] Disclosed herein, in some embodiments, are nucleic acid sequences encoding a gene editing system comprising a nickase, a reverse transcriptase, and a guide polynucleotide, a fusion protein comprising a nickase and a reverse transcriptase, or a guide polynucleotide.

[0396] In some embodiments, the nucleic acid encoding the gene editing system, fusion protein, or guide polynucleotide is a DNA, for example a linear DNA, a plasmid DNA, or a minicircle DNA. In some embodiments, the nucleic acid encoding the gene editing system, fusion protein, or guide polynucleotide is an RNA, for example a mRNA.

[0397] In some embodiments, the nucleic acid encoding the gene editing system, fusion protein, or guide polynucleotide is delivered by a nucleic acid-based vector. In some embodiments, the nucleic acid encoding the gene editing system, fusion protein, or guide polynucleotide is delivered by a plasmid (e.g., circular DNA molecules that can autonomously replicate inside a cell), cosmid (e.g., pWE or sCos vectors), artificial chromosome, human artificial chromosome (HAC), yeast artificial chromosomes (YAC), bacterial artificial chromosome (BAC), P1-derived artificial chromosomes (PAC), phagemid, phage derivative, bacmid, or virus. In some embodiments, the nucleic acid is comprised in a vector selected from the list consisting of: pSF-CMV-NEO-NH2-PPT-3XFLAG, pSF-CMV-NEO-COOH-3XFLAG, pSF-CMV-PURO-NH2-GST-TEV, pSF-OXB20-IH-TEV-FLAG(R)-6His, pCEP4 pDEST27, pSF-CMV-Ub-KrYFP, pSF-CMV-FMDV-daGFP, pEF1a-mCherry-N1 vector, pEFla-tdTomato vector, pSF-CMV-FMDV-Hygro, pSF-CMV-PGK-Puro, pMCP-tag(m), pSF-CMV-PURO-NH2-CMYC, pSF-OXB20-BetaGal, pSF-OXB20-Fluc, pSF-OXB20, pSF-Tac, pRI 101-AN DNA, pCambia2301, pTYB21, pKLAC2, pAc5.1/V5-His A, and pDEST8.

[0398] In some embodiments, the nucleic acid-based vector comprises a promoter. In some embodiments, the promoter is selected from the group consisting of a mini promoter, an inducible promoter, a constitutive promoter, and derivatives thereof. In some embodiments, the promoter is selected from the group consisting of CMV, CBA, EF1a, CAG, PGK, TRE, U6, UAS, T7, Sp6, lac, araBad, trp, Ptac, p5, p19, p40, Synapsin, CaMKII, GRK1, and derivatives thereof. In some embodiments the promoter is a U6 promoter. In some embodiments, the promoter is a CAG promoter.

[0399] In some embodiments, the nucleic acid-based vector is a virus. In some embodiments, the virus is an alphavirus, a parvovirus, an adenovirus, an AAV, a baculovirus, a Dengue virus, a lentivirus, a herpesvirus, a poxvirus, an anellovirus, a bocavirus, a vaccinia virus, or a retrovirus. In some embodiments, the virus is an alphavirus. In some embodiments, the virus is a parvovirus. In some embodiments, the virus is an adenovirus. In some embodiments, the virus is an AAV. In some embodiments, the virus is a baculovirus. In some embodiments, the virus is a Dengue virus. In some embodiments, the virus is a lentivirus. In some embodiments, the virus is a herpesvirus. In some embodiments, the virus is a poxvirus. In some embodiments, the virus is an anellovirus. In some embodiments, the virus is a bocavirus. In some embodiments, the virus is a vaccinia virus. In some embodiments, the virus is or a retrovirus.

[0400] In some embodiments, the AAV is AAV1, AAV2, AAV3, AAV4, AAV5, AAV6, AAV7, AAV8, AAV9, AAV10, AAV11, AAV12, AAV13, AAV14, AAV15, AAV16, AAV-rh8, AAV-rh10, AAV-rh20, AAV-rh39, AAV-rh74, AAV-rhM4-1, AAV-hu37, AAV-Anc80, AAV-Anc80L65, AAV-7m8, AAV-PHP-B, AAV-PHP-EB, AAV-2.5, AAV-2tYF, AAV-3B, AAV-LKO3, AAV-HSC1, AAV-HSC2, AAV-HSC3, AAV-HSC4, AAV-HSC5, AAV-HSC6, AAV-HSC7, AAV-HSC8, AAV-HSC9, AAV-HSC10, AAV-HSC11, AAV-HSC12, AAV-HSC13, AAV-HSC14, AAV-HSC15, AAV-TT, AAV-DJ/8, AAV-Myo, AAV-NP40, AAV-NP59, AAV-NP22, AAV-NP66, AAV-HSC16, or a derivative thereof. In some embodiments, the herpesvirus is HSV type 1, HSV-2, VZV, EBV, CMV, HHV-6, HHV-7, or HHV-8.

[0401] In some embodiments, the virus is AAV1 or a derivative thereof. In some embodiments, the virus is AAV2 or a derivative thereof. In some embodiments, the virus is AAV3 or a derivative thereof. In some embodiments, the virus is AAV4 or a derivative thereof. In some embodiments, the virus is AAV5 or a derivative thereof. In some embodiments, the virus is AAV6 or a derivative thereof. In some embodiments, the virus is AAV7 or a derivative thereof. In some embodiments, the virus is AAV8 or a derivative thereof. In some embodiments, the virus is AAV9 or a derivative thereof. In some embodiments, the virus is AAV10 or a derivative thereof. In some embodiments, the virus is AAV11 or a derivative thereof. In some embodiments, the virus is AAV12 or a derivative thereof. In some embodiments, the virus is AAV13 or a derivative thereof. In some embodiments, the virus is AAV14 or a derivative thereof. In some embodiments, the virus is AAV15 or a derivative thereof. In some embodiments, the virus is AAV16 or a derivative thereof. In some embodiments, the virus is AAV-rh8 or a derivative thereof. In some embodiments, the virus is AAV-rh10 or a derivative thereof. In some embodiments, the virus is AAV-rh20 or a derivative thereof. In some embodiments, the virus is AAV-rh39 or a derivative thereof. In some embodiments, the virus is AAV-rh74 or a derivative thereof. In some embodiments, the virus is AAV-rhM4-1 or a derivative thereof. In some embodiments, the virus is AAV-hu37 or a derivative thereof. In some embodiments, the virus is AAV-Anc80 or a derivative thereof. In some embodiments, the virus is AAV-Anc80L65 or a derivative thereof. In some embodiments, the virus is AAV-7m8 or a derivative thereof. In some embodiments, the virus is AAV-PHP-B or a derivative thereof. In some embodiments, the virus is AAV-PHP-EB or a derivative thereof. In some embodiments, the virus is AAV-2.5 or a derivative thereof. In some embodiments, the virus is AAV-2tYF or a derivative thereof. In some embodiments, the virus is AAV-3B or a derivative thereof. In some embodiments, the virus is AAV-LK03 or a derivative thereof. In some embodiments, the virus is AAV-HSC1 or a derivative thereof. In some embodiments, the virus is AAV-HSC2 or a derivative thereof. In some embodiments, the virus is AAV-HSC3 or a derivative thereof. In some embodiments, the virus is AAV-HSC4 or a derivative thereof. In some embodiments, the virus is AAV-HSC5 or a derivative thereof. In some embodiments, the virus is AAV-HSC6 or a derivative thereof. In some embodiments, the virus is AAV-HSC7 or a derivative thereof. In some embodiments, the virus is AAV-HSC8 or a derivative thereof. In some embodiments, the virus is AAV-HSC9 or a derivative thereof. In some embodiments, the virus is AAV-HSC10 or a derivative thereof. In some embodiments, the virus is AAV-HSC11 or a derivative thereof. In some embodiments, the virus is AAV-HSC12 or a derivative thereof. In some embodiments, the virus is AAV-HSC13 or a derivative thereof. In some embodiments, the virus is AAV-HSC14 or a derivative thereof. In some embodiments, the virus is AAV-HSC15 or a derivative thereof. In some embodiments, the virus is AAV-TT or a derivative thereof. In some embodiments, the virus is AAV-DJ/8 or a derivative thereof. In some embodiments, the virus is AAV-Myo or a derivative thereof. In some embodiments, the virus is AAV-NP40 or a derivative thereof. In some embodiments, the virus is AAV-NP59 or a derivative thereof. In some embodiments, the virus is AAV-NP22 or a derivative thereof. In some embodiments, the virus is AAV-NP66 or a derivative thereof. In some embodiments, the virus is AAV-HSC16 or a derivative thereof.

[0402] In some embodiments, the virus is HSV-1 or a derivative thereof. In some embodiments, the virus is HSV-2 or a derivative thereof. In some embodiments, the virus is VZV or a derivative thereof. In some embodiments, the virus is EBV or a derivative thereof. In some embodiments, the virus is CMV or a derivative thereof. In some embodiments, the virus is HHV-6 or a derivative thereof. In some embodiments, the virus is HHV-7 or a derivative thereof. In some embodiments, the virus is HHV-8 or a derivative thereof.

[0403] In some embodiments, the nucleic acid encoding the gene editing system, fusion protein, or guide polynucleotide is delivered by a non-nucleic acid-based delivery system (e.g., a non-viral delivery system). In some embodiments, the nucleic acid is comprised in a liposome. In some embodiments, the nucleic acid is associated with a lipid. The nucleic acid associated with a lipid, in some embodiments, is encapsulated in the aqueous interior of a liposome, interspersed within the lipid bilayer of a liposome, attached to a liposome via a linking molecule that is associated with both the liposome and the nucleic acid, entrapped in a liposome, complexed with a liposome, dispersed in a solution containing a lipid, mixed with a lipid, combined with a lipid, contained as a suspension in a lipid, contained or complexed with a micelle, or otherwise associated with a lipid. In some embodiments, the nucleic acid is comprised in a lipid nanoparticle (LNP).

[0404] In some embodiments, the nucleic acid encoding the gene editing system, fusion protein, or guide polynucleotide is introduced into the cell in any suitable way, either stably or transiently. In some embodiments, a fusion protein or genome editing system is transfected into the cell. In some embodiments, the cell is transduced or transfected with a nucleic acid construct that encodes a fusion protein or genome editing system. For example, a cell is transduced (e.g., with a virus encoding a fusion protein or genome editing system), or transfected (e.g., with a plasmid encoding a fusion protein or genome editing system) with a nucleic acid that encodes a fusion protein or genome editing system, or the translated fusion protein or genome editing system. In some embodiments, the transduction is a stable or transient transduction. In some embodiments, cells expressing a fusion protein or genome editing system or containing a fusion protein or genome editing system are transduced or transfected with one or more gRNA or pegRNA molecules, for example when the fusion protein or genome editing system comprises a CRISPR nuclease. In some embodiments, a plasmid expressing a fusion protein or genome editing system is introduced into cells through electroporation, transient (e.g., lipofection) and stable genome integration (e.g., piggybac) and viral transduction (for example lentivirus or AAV) or other methods known to those of skill in the art. In some embodiments, the gene editing system is introduced into the cell as one or more polypeptides. In some embodiments, delivery is achieved through the use of RNP complexes. Delivery methods to cells for polypeptides and/or RNPs are known in the art, for example by electroporation or by cell squeezing.

[0405] Exemplary methods of delivery of nucleic acids include lipofection, nucleofection, electroporation, stable genome integration (e.g., piggybac), microinjection, biolistics, virosomes, liposomes, immunoliposomes, polycation or lipid nucleic acid conjugates, naked DNA, artificial virions, and agent-enhanced uptake of DNA. Lipofection is described in e.g., U.S. Pat. Nos. 5,049,386; 4,946,787; and 4,897,355) and lipofection reagents are sold commercially (e.g., Transfectam™, Lipofectin™ and SF Cell Line 4D-Nucleofector X Kit™ (Lonza)). Cationic and neutral lipids that are suitable for efficient receptor-recognition lipofection of polynucleotides include those of WO 91/17424 and WO 91/16024. In some embodiments, the delivery is to cells (e.g., in vitro or ex vivo administration) or target tissues (e.g., in vivo administration). In some embodiments, the nucleic acid is comprised in a liposome or a nanoparticle that specifically targets a host cell.

[0406] Additional methods for the delivery of nucleic acids to cells are known to those skilled in the art. See, for example, US 2003/0087817.

### Methods of Use

[0407] Described herein, in some embodiments, are methods for modifying a double- and/or single-stranded nucleic acid, comprising a) providing a cell with a guide nucleic acid to bind to a target strand of the double-stranded nucleic acid; b) providing a cell with a nuclease or nickase to cleave the double-stranded nucleic acid at a location of binding of the guide nucleic acid; c) providing a cell with a reverse transcriptase to synthesize a modification in the target strand of the double-stranded nucleic acid at a location of cleavage by the nickase and/or double strand nuclease.

[0408] In some embodiments, the methods are used to introduce a modification in the genome of a cell. In some embodiments, the modification is an insertion, deletion, or mutation. In some embodiments, the methods are used to introduce site-directed insertions, deletions, and/or mutations in the genome of a cell (for example an insertion and a mutation). In some embodiments, the methods are used in combination with a nucleic acid template to facilitate site-directed insertions into the genome of a cell. In some embodiments, the cell is a human cell. In some embodiments, the cell genome or a vector comprised in the cell is modified. In some embodiments, the cell genome is modified ex vivo. In some embodiments, the cell genome is modified in vivo.

[0409] In some embodiments, the methods further comprise providing the cell a transposase, integrase, or homing endonuclease. In some embodiments, the methods further comprise providing the cell a retrotransposon. In some embodiments, the method further comprises providing an RNA or DNA insertion template.

[0410] In some embodiments, the methods described herein further comprise detecting the genome modifications. In some embodiments, after the cell genome is modified, the cell is cultured for a certain amount of time. In some embodiments, the DNA or RNA is extracted and sequenced, and modified sequence areas are mapped and compared with an unmodified sequence. In some embodiments, cells are stained with antibodies for protein products that are translated from the modified nucleic acid, and the resulting stained proteins or polypeptides in the cell are analyzed, for example by flow cytometry.

[0411] The methods described herein can be used, for example, for targeted SNP corrections, small insertions, or small deletions. Additionally, the methods described herein can be used for targeted insertion of large templates into the genome of a cell by using a suitable RTT.

### Kits

[0412] In some embodiments, this disclosure provides kits comprising one or more nucleic acid constructs encoding the various components of the fusion protein or genome editing system described herein, e.g., comprising a nucleotide sequence encoding the components of the fusion protein or genome editing system capable of modifying a target DNA sequence. In some embodiments, the nucleotide sequence comprises a heterologous promoter that drives expression of the RNA genome editing system components.

[0413] In some embodiments, any of the targetable reverse transcriptases or genome editing systems disclosed herein is assembled into a pharmaceutical, diagnostic, or research kit to facilitate its use in therapeutic, diagnostic, or research applications. A kit may include one or more containers housing any of the vectors disclosed herein and instructions for use.

[0414] The kit may be designed to facilitate use of the methods described herein by researchers and can take many forms. Each of the compositions of the kit, where applicable, may be provided in liquid form (e.g., in solution), or in solid form, (e.g., a dry powder). In certain cases, some of the compositions may be constitutable or otherwise processable (e.g., to an active form), for example, by the addition of a suitable solvent or other species (for example, water or a cell culture medium), which may or may not be provided with the kit. As used herein, “instructions” can define a component of instruction and/or promotion, and typically involve written instructions on or associated with packaging of the disclosure. Instructions also can include any oral or electronic instructions provided in any manner such that a user will clearly recognize that the instructions are to be associated with the kit, for example, audiovisual (e.g., videotape, DVD, etc.), Internet, and/or web-based communications, etc. The written instructions, in some embodiments, are in a form prescribed by a governmental agency regulating the manufacture, use, or sale of pharmaceuticals or biological products, which instructions can also reflect approval by the agency of manufacture, use, or sale for animal administration.

### EXAMPLES

[0415] The following examples are given for the purpose of illustrating various embodiments of the disclosure and are not meant to limit the present disclosure in any fashion. The present examples, along with the methods described herein are presently representative of preferred embodiments, are exemplary, and are not intended as limitations on the scope of the disclosure. Changes therein and other uses which are encompassed within the spirit of the disclosure as defined by the scope of the claims will occur to those skilled in the art.

### Example 1. Bioinformatic Identification of Reverse Transcriptases from Metagenomic Databases

[0416] This example describes the identification of proteins with reverse transcriptase function by a bioinformatic approach.

[0417] An extensive assembly-driven metagenomic database of microbial, viral, and eukaryotic genomes was bioinformatically analyzed for proteins with putative reverse transcriptase function. The analysis uncovered millions of proteins with predicted reverse transcriptase function. The predicted RT hits were then bioinformatically filtered for complete open reading frames (ORFs) with a high quality RT domain hit covering over 70% of the reference RT domains, and containing expected catalytic residues. After filtering, 468 RTs were selected for their potential to develop gene editing tools (SEQ ID NOs: 161-629). For all of these identified putative RTs, the predicted active site tetrad motif is [Y/F]XDD, where the most frequent amino acid at position one of the tetrad is tyrosine (Y, 85.2%) or phenylalanine (F, 14.5%). The second position of the tetrad is much more diverse, with the most frequent residues being alanine (A, 55.5%), isoleucine (I, 9.3%), and valine (V, 19.3%). The aspartate dyad (DD) is the most conserved feature for RT activity.

### Example 2. Reverse Transcriptases (RTs) for Short Corrections, Small Insertions, and Deletions

[0418] This example describes the use of untethered reverse transcriptases in combination with pegRNAs for targeted genome editing in HEK293T cells.

Testing Reverse Transcriptase Candidates with Untethered Nickase

[0419] Reverse transcriptase (RT) candidates from the MG151 (SEQ ID NOs: 1-37), MG153 (SEQ ID NOs: 38-61), and MG160 families (SEQ ID NOs: 62-75) were cloned into a plasmid where expression of the RT candidate is driven by the CMV promoter. The plasmid was isolated for transfection into HEK293T cells. A second plasmid containing a nickase spCas9 (H840A) where the expression was driven by a CMV promoter, and the RT-containing plasmid were co-transfected. Chemically synthesized pegRNAs (SEQ ID NOs: 76-99) containing the desired edit in the RT template were transfected. All components (plasmids and pegRNAs) were reverse transfected into 150,000 HEK293T cells in a 24 well plate. 72 hours post-transfection, cells were lysed in 100 L of solution. Primers containing barcodes for next generation sequencing (NGS) (SEQ ID NOs: 100-101) were used to amplify a ˜250 bp target (SEQ ID NO: 102) with mastermix. PCR clean-up was then performed, and samples were NGS sequenced. FASTQ files were then processed using prime editing to determine the percentage of reads with desired change.

### MG151Family

[0420] Untethered MG151 candidates 80-85 (SEQ ID NOs: 1-6), 87-100 (SEQ ID NOs: 7-20), and 102-117 (SEQ ID NOs: 22-37) were tested for prime editing in HEK293T cells to determine percent change of desired correction. Percent editing for each RT is shown in FIGS. 1A-1JJ for each pegRNA with varying PBS lengths (2, 4, 6, 8, 10, 13, 16, 20 nucleotides) (SEQ ID NOs: 76-83). In a single replicate, MG151-98 (SEQ ID NO: 18) and MG151-99 (SEQ ID NO: 19) had six-fold and four-fold higher editing than the wild-type MMLV, respectively (FIG. 2). MG151 candidates MG151-100 (SEQ ID NO: 19), MG151-103 (SEQ ID NO: 23), MG151-104 (SEQ ID NO: 24), and MG151-105 (SEQ ID NO: 25) had half as much or equivalent editing levels to wild-type MMLV (FIG. 2).

### MG153Family

[0421] Untethered MG153 candidates 1-5 (SEQ ID NOs: 38-42), 7-21 (SEQ ID NOs: 44-58), and 25-27 (SEQ ID NOs: 59-61) were tested for prime editing in HEK293T cells to determine percent change of desired correction. Percent editing for each RT is shown in FIGS. 3A-30 and 3P-3W for each pegRNA with varying PBS lengths (2, 4, 6, 8, 10, 13, 16, 20 nucleotides) (SEQ ID NOs: 76-83). MG153-1 (SEQ ID NO: 38), MG153-3 (SEQ ID NO: 40), MG153-7 (SEQ ID NO: 44), MG153-9 (SEQ ID NO: 46), MG153-12 (SEQ ID NO: 49), and MG153-15 (SEQ ID NO: 52) have shown editing levels above background or comparable to MMLLV wild-type.

### MG160Family

[0422] Untethered MG160 family candidates MG160-1 through MG160-8 (SEQ ID NOs: 62-68) were tested in mammalian cells for activity as described above. Activity above background was seen for untethered candidates MG160-1 (SEQ ID NO: 62) and MG160-4 (SEQ ID NO: 65). (FIGS. 4A-4G).

### Testing Reverse Transcriptase Candidates Tethered to a Nickase

[0423] The activity of diverse RT classes with CRISPR Type II nucleases was evaluated. RT candidates were cloned into a plasmid containing the nickase spCas9(H840A) to generate an RT-nickase fusion. The CMV promoter drove the expression of the RT-Nickase fusion protein, which contained a thirty three amino acid linker (SEQ ID NO: 103) between the nickase and the RT candidate. The fusion protein was then transfected into HEK293T cells and processed for NGS as described above.

[0424] The activity of tethered MG160 candidates 1-5 (SEQ ID NOs: 69-73) is shown in FIGS. 5A-5E. Specifically, candidate MG160-4 (SEQ ID NO: 72) had comparable levels to wild-type MMLV (FIG. 5D). All other MG160 candidates (SEQ ID NOs: 69-72) had at least half the activity of wild-type MMLV at a specific PBS length. Moreover, when MG160-1 (SEQ ID NO: 69) and MG160-4 (SEQ ID NO: 72) were repeated with two additional biological replicates, the editing was comparable to MMLV WT for MG160-1 (SEQ ID NO: 69), and the editing was 2-fold higher for MG160-4 (SEQ ID NO: 72) (FIGS. 5F-5G).

[0425] The data above demonstrates that several RTs from different phylogenetic families were identified that showed comparable or higher activity than MMLV WT in a prime editing context. Having activity across a broad range of families allows the identification of RT candidates for different kinds of genomic modifications (i.e., SNP corrections, insertions, or deletions). At least 2 RTs with sizes ˜250 aa that perform similarly or outperform MMLV WT (MG160-1 (SEQ ID NO: 69) and MG160-4 (SEQ ID NO: 72)) were identified. The small size of the RT (⅓ of MMLV WT) allows an efficient delivery using adeno-associated viruses (AAVs) and lipid nanoparticles (LNPs).

### Example 3. RTs for Short Corrections, Small Insertions and Deletions (Prophetic)

[0426] This example describes the use of additional reverse transcriptases in combination with pegRNAs for targeted genome editing in HEK293T cells.

[0427] Additional RTs from the MG151 and MG153 families, including MG151-101 (SEQ ID NO: 21), MG153-6 (SEQ ID NO: 43), or additional candidates are tested as described in Example 2 in the untethered format. This allows for the identification of additional RT candidates for small corrections, insertions, and deletions.

[0428] RTs from the MG160 family which include MG160-6 (SEQ ID NO: 74), MG160-8 (SEQ ID NO: 75), and other candidates are tested for editing as described above in the tethered system. This allows to for the identification of additional miniature (˜250aa) RT systems that may mediate small corrections, insertions, and deletions.

### Example 4. Nucleases for Mediating Short Corrections, Small Insertions, and Deletions in Conjunction with Reverse Transcriptases

[0429] This example describes the use of an RNA-guided nuclease in combination with pegRNAs for targeted genome editing in HEK293T cells.

[0430] To evaluate the requirements for designing pegRNAs (gRNA with 3′ extension) for the nucleases of the disclosure, a number of PBS with varying lengths were assessed for maintaining a proper nuclease-gRNA interaction. To test for nuclease activity in combination with the pegRNA designs, InDel formation in HEK293T cells was tested. MG3-6 (SEQ ID NO: 104) was used as a nuclease with a combination of pegRNAs with various PBS lengths. Four endogenous genomic target sites (AAVS1 (SEQ ID NO: 105), B2M (SEQ ID NO: 106), CD5 (SEQ ID NO: 107), and CD38 (SEQ ID NO: 108) that were known to be recognized by wild-type MG3-6 (SEQ ID NO: 104) were targeted with chemically synthesized pegRNAs with varying PBS lengths: 2, 4, 8, 10, 13, 16, and 20 nucleotides (SEQ ID NOs: 109-140). MG3-6 mRNA (SEQ ID NO: 104) was co-transfected with guide RNA (control) or pegRNA (of various PBS lengths). The RNA was reverse transfected with 50,000 HEK293T cells into a 24-well plate. 48 hours post-transfection, cells were lysed in 100 μL of solution. Primers (SEQ ID NOs: 141-148) were used to amplify ˜700 bp of target product (SEQ ID NOs: 105-108) with mastermix. Samples were then cleaned up and Sanger sequenced. Sanger sequences were then processed for ICE analysis to calculate InDel percentage at each target site.

[0431] Sanger sequencing traces using ICE analysis showed that wild-type MG3-6 prefers pegRNAs with PBS lengths equal to or less than eight nucleotides (FIGS. 6A-6D). WT guide RNA (without a PBS region) in conjunction with MG3-6 mRNA (SEQ ID NO: 104) gave the highest InDel percentage for all endogenous targets (55% AAVS1, 84%1B2M, 58.5% CD5, and 24% CD38) in comparison to pegRNAs for the corresponding target genes. As the PBS length increased from two to twenty nucleotides, InDel percentage decreased at all endogenous targets (SEQ ID NOs: 105-108). For example, InDel percentage at target site AAVS1 (SEQ ID NO: 105) (FIG. 6A) with a PBS length of 2 nucleotides (SEQ ID NO: 109) (53%) was similar to what was seen with the WT guide RNA (SEQ ID NO: 116) (55%), but with a PBS length of 20 nucleotides (SEQ ID NO: 115), the InDel percentage dropped to ˜11%. Thus, the results show the general rules for pegRNA design for the MG3-6 gene editing system and highlight the importance of identifying RTs with shorter PBS lengths requirements.

### Example 5. Use of Processive RTs in Combination with a Modified pegRNA for Short Corrections, Small Insertions and Deletions (Prophetic)

[0432] This example describes the use of reverse transcriptases in combination with a CRISPR nickase and a pegRNA for targeted genome editing in HEK293T cells.

[0433] The current setting for prime editing requires a pegRNA that consists of a spacer followed by crRNA, tracr, RTT, and PBS (from 5′-3′). It has been demonstrated that MMLV WT (MMLV1) and MMLV pentamutant (MMLV2) have some level of pegRNA readthrough, thus incorporating parts of the tracr sequence into the genomic DNA (gDNA), a non-desired characteristic as this design creates unwanted mutations in the genomic DNA. RTs from the GII intron family that are expressed well and show high activity for cDNA synthesis in mammalian cells were identified. The RTs from the GII intron family generally show higher processivity than retroviral RTs. Higher processivity translates to RTs being able to read through structured RNA (for example: the crRNA-tracr portion of the pegRNA) and being able to read through small/mid-size chemical modifications in the RNA. Since RTs from the GII intron show good cDNA synthesis activity and good expression in mammalian cells, they are used in a prime editing context to generate small genomic corrections, small insertions, and/or deletions. In order to use processive RTs in the prime editing context, pegRNA readthrough as described above needs to be avoided. To achieve pegRNA readthrough by the RT, bulky modifications are incorporated in the pegRNA, for example into the last base of the RTT if read from 3′ to 5′ (or first base of RTT if read from 5′ to 3′). Bulky modifications include, for example, complex sugars, or complex amino groups, and/or other modifications compatible with RNAs.

[0434] Plasmids containing the nickase and any processive RTs to be tested for activity are transfected into cells, for example HEK293T cells, using lipofectamine 2000. Chemically synthesized RNAs (with or without the bulky modifications included) are transfected into the cells using lipofectamine messenger max. 72 hours post-transfection, cells are lysed in 100 L of solution. Primers containing barcodes for next generation sequencing (NGS) (SEQ ID NOs: 100-101) are used to amplify a ˜250 bp target (SEQ ID NO: 102). PCR cleanup is then performed, and samples are NGS sequenced. The resulting FASTQ files are processed using prime editing to determine the percentage of reads with desired change.

[0435] The experiments described above allow the use of high-performing RTs in a mammalian cell context for prime editing with little or no pegRNA readthrough.

### Example 6. RTs for Programmable, Large Cargo Integrations Via Target-Primed Reverse Transcription (Prophetic)

[0436] This example describes the use of reverse transcriptases with retrotransposase activity in combination with a CRISPR nickase and a pegRNA for targeted genome editing.

[0437] Targetable integration of large cargo into human genomic DNA in living cells has been a long sought goal for gene editing. To date, the most efficient way to achieve large cargo integration into the genome of a cell is by using lentiviruses. However, lentiviral-mediated integration lacks the targetability feature, as integration occurs mostly randomly in the open chromatin of a cell. For large cargo integration, RTs with high processivity and high fidelity in conjunction with nucleases are advantageous. The nuclease provides targetability in the gDNA, whereas the RT utilizing a target-primed reverse transcription mechanism can integrate the large RNA cargo into the mammalian gDNA.

[0438] The potential of RT candidates to generate large integrations is tested by their ability to retrotranspose an RNA template containing a GFP cassette that can only produce GFP (and therefore fluorescence) upon successful retrotransposition. The target for retrotransposition is determined by a nuclease. This nuclease creates the primer site through a double-strand break event. Type II nucleases (alternatively Type V nucleases) are tested to identify the best nuclease for gDNA primer generation. The VEGFA gene is chosen for target integration and is targeted by the nuclease together with a chemically synthesized VEGFA guide (SEQ ID NO: 149). The candidate reverse transcriptases are cloned into a plasmid for mammalian expression under the CMV promoter. To localize the RT to the nucleus upon expression, one or more nuclear localization signal (NLS) sequences are added on both N- and C-termini of the RT. Additionally, an MS2 coat protein (MCP) sequence and a Flag-HA (FH) tag are fused to the N-terminus of the RT. MCP is a protein derived from the MS2 bacteriophage that recognizes a 20 nucleotide RNA stem loop (MS2 loop) with high affinity (in the subnanomolar Kd range). Adding MS2 loops to the RT template encoded within the same plasmid ensures that the expressed MCP-RT fusion protein finds the RNA template for reverse transcription. Additionally, a 20 nucleotide sequence complementary to the 3′ overhang generated by the nuclease serves as the primer binding site (PBS) for initiating reverse transcription. To quantify the efficiency of retrotransposition, an inverted GFP cassette driven by an EF1 alpha promoter is cloned downstream of the RT fusion. The GFP is interrupted by an intron (two different intron sequences, named normal intron and chimeric intron, are tested) oriented such that it can only be spliced out from the transcript driven by the CMV promoter and not the EF1 alpha promoter (FIG. 7). Therefore, the cells can express GFP fluorescence only upon the successful retrotransposition of this spliced RNA. The PBS and MS2 loops are cloned downstream of the EF1 alpha promoter, followed by a polyA sequence to stabilize the RNA template. This design ensures that the GFP fluorescence exhibited by cells expressing this plasmid correlates with the efficiency of retrotransposition, and thereby gives a measure of the ability of the RT candidates to reverse transcribe and integrate large stretches of DNA.

[0439] RT candidates are cloned into the GFP-based retrotransposition plasmid (SEQ ID NOs: 150-151 and 2580-2581) and isolated for transfection into HEK293T cells. Transfection is performed using Lipofectamine 2000. 24 hours later, cells are split into a medium containing Puromycin to select for transfected cells expressing the plasmid. Five days later, cells are flowed on a cell sorter, and the percentage of GFP positive cells in the population is quantified.

[0440] To test hundreds or thousands of RTs and/or conditions (engineered systems) the method above also allows for high-throughput testing. Hundreds or thousands of conditions are pooled together and a single pooled plasmid transfection is performed. Cells expressing GFP are sorted five days post transfection. Identification of best performing RTs is made by sequencing GFP-positive cells and mapping the RTs by using a combination of random primers and primers matching the second exon of GFP. Enriched RTs by this pooled method are then validated individually.

[0441] This methodology allows for the identification of RTs capable of large cargo integration mediated by a target-primed reverse transcription mechanism. The engineered nuclease/RT constructs thus allow the development of an RNA-mediated large cargo integration into genomic DNA of mammalian cells.

### Example 7. RTs for Programmable, Large Cargo Integrations Mediated by a Single-Stranded DNA Transposase (Prophetic)

[0442] This example describes the use of reverse transcriptases with retrotransposase activity in combination with TnpA for targeted genome editing.

[0443] Retrons are DNA elements that contain an RT enzyme encoded downstream of a conserved non-coding structural RNA. The non-coding RNA consists of two inverted regions, referred to as msr and msd. When the retron RT recognizes the folded ncRNA, it reverse transcribes the msd portion (template) producing ssDNA.

[0444] IS200/IS605 transposons are a type of mobile genetic element that integrate ssDNA at specific target sites by a TnpA transposase. TnpA excises a donor by recognizing structural motifs at each donor end, integrating it at a recognized target site accessible as ssDNA.

[0445] An ssDNA produced by a retron RT can be used as a template by TnpA for programmable integration of desired cargo into a specific target site. Specifically, the retron msd can contain the desired cargo (for example, an antibiotic resistance cassette or fluorescent marker) flanked by LE and RE structural motifs recognizable by TnpA. The TnpA transposase excises and circularizes the ssDNA donor, and integration into a target occurs via recognition of a specific motif available through an R-loop formed by the RNA-guided recognition and binding of an engineered (nickase or dead) effector (for example, MG3-6) (FIG. 8).

### Example 8. RTs for Short Corrections, Small Insertions, and Deletions

Testing Reverse Transcriptase Candidates Untethered from the Cas Nickase

[0446] Reverse transcriptase (RT) candidates from the MG151 and MG153 families were cloned into a plasmid where expression of the RT candidate is driven by the CMV promoter. The plasmid was then isolated for transfection in HEK293T cells. Another plasmid containing a nickase spCas9 (H840A) driven via CMV promoter and the RT-containing plasmid were co-transfected. A chemically synthesized pegRNA (SEQ ID NOs: 656-697) containing the desired edit in the RT template was transfected. All components (plasmids and pegRNAs) were reverse transfected into 150,000 HEK293T cells in a 24 well plate. 72 hours post-transfection, cells were lysed in 100 μL of solution. Primers containing barcodes for next generation sequencing (NGS) (SEQ ID NOs: 649-650) were used to amplify a ˜250 bp target (SEQ ID NOs: 654-655) with mastermix. PCR cleanup was then performed, and samples were sent for NGS sequencing. FASTQ files were then processed using prime editing to determine the percentage of reads with the desired change.

[0447] Untethered MG151 candidates MG118-MG135 (SEQ ID NOs: 710-727) were tested for prime editing in HEK293T cells to determine percent change of a desired correction. Percent editing for each RT is shown in FIGS. 9A-9R for each pegRNA with varying PBS lengths (2, 4, 6, 8, 10, 13, 16, and 20 nucleotides). In a single replicate, MG151-123 through MG151-126 had equivalent or superior editing efficiencies as compared to MMLV WT RT (FIGS. 9F-9I). These results were reproduced, and the biological replicates are shown in FIGS. 10A-1OD, with the four candidates editing at comparable levels to MMLV WT when challenged to perform a G-T transversion. Importantly, all of these candidates performed well with PBS lengths of 8nt, enabling the shortening of the pegRNA and the PBS-spacer hybridization window.

[0448] Moreover, two candidates from the 151 family (MG151-98 and MG151-99) were subjected to rational engineering to install beneficial mutations observed in other RTs (Anzalone et al, 2022). Various point mutations by themselves or combined, as well as truncations of the RNaseH domain, were evaluated (SEQ ID NOs: 750-766). Mutations H171N, K297P, and trimming the last 166aa of MG151-98 improved prime editing efficiency, with some of those mutations outperforming MMLV pentamutant (FIGS. 11A-11B). For MG151-99, I264K, R556K, and the trimming the last 152 aa proved to be beneficial (FIGS. 11C-11D). An overview of MG151 candidates evaluated for G-T transversion in HEK293T cells targeting the VEGFA gene is shown in FIGS. 12A-12B.

[0449] Untethered MG153 candidates MG153-29, MG153-31, MG153-33, MG153-35, MG153-36, MG153-45, and MG153-53 were tested for prime editing in HEK293T cells to determine the percent change of a desired correction. Percent editing for each RT is shown in FIGS. 13A-13H for each pegRNA with varying PBS lengths (2, 4, 6, 8, 10, 13, 16, and 20 nucleotides). Several RTs, including MG153-33, MG153-35, MG153-45, and MG153-53, are active at comparable or superior levels as compared to MMLV WT RT (FIGS. 13C-13D and FIGS. 13F-13G). Importantly, MG153-53 outperformed MMLV WT by over 2-fold (FIG. 13G). This candidate was also active when tested as a fusion protein with Cas9 (FIG. 13H), demonstrating its versatility. An overview of MG153 candidates evaluated for G-T transversion in HEK293T cells targeting the VEGFA gene is shown in FIGS. 14A-14B.

### Testing Reverse Transcriptase Candidates Tethered to a Cas Nickase

[0450] RT candidates were cloned into a plasmid containing the nickase spCas9(H840A) to generate an RT-nickase fusion. The CMV promoter drove the expression of the fusion protein, which contained a thirty three amino acid linker (SEQ ID NO: 103) between the nickase and RT candidate. The fusion protein was then transfected into HEK293T cells and processed for NGS as described above.

[0451] Editing activity of RT candidates MG160-17, MG160-28, MG160-31, MG160-37, MG160-40, and MG160-51 through MG160-67 is shown in FIGS. 15A-15U. Several candidates showed comparable editing levels to MMLV WT, including MG160-17, MG160-28, MG160-37, MG160-54, MG160-56, MG160-57, MG160-59, MG160-64, MG160-65, and MG160-63. An overview of MG153 candidates evaluated for G-T transversion in HEK293T cells targeting the VEGFA gene is shown in FIGS. 16A-16B.

[0452] The results demonstrate that several RTs from different phylogenetic families exhibited similar or higher activity than MMLV WT RT in a prime editing context. Having activity across a broad range of families allows for the nomination of RT candidates which may be best suited for different kinds of modifications (i.e., SNP corrections, insertions, or deletions). Moreover, several RTs with sizes ˜250 aa were identified that perform similarly to or outperform MMLV WT. Their small size (about one third of the size of the MMLV WT RT) makes them promising candidates for development of compact systems that can enable efficient delivery using adenoviruses (AAVs) and lipid nanoparticles (LNPs).

### RTs for Small Insertions and Deletions

[0453] RT candidates from the MG151, MG153, and MG160 families were challenged to perform 24nt insertions, as well as 15nt deletions, in the VEGFA gene to test their ability to perform small and mid-size corrections (FIGS. 17A-24H). Most candidates that performed well in the G-T transversion experiments were able to also perform insertions and deletions efficiently. For example, well performing candidates from the MG151 family included MG151-98, MG151-99 (FIGS. 17A-17D), MG151-23 (FIGS. 18A and 18E), and MG151-26 (FIGS. 18D and 18H), as well as the engineered variants K297P, H171N, and 166 aa trimmed for MG151-98 (FIGS. 19A-19D) and I264K, R556K, and 152 aa trimmed for MG151-99 (FIGS. 20A-20D). MG153-53 was a well performing candidate from the MG153 family (FIGS. 21D and 22D). Well performing candidates from the MG160 family included MG160-4 (FIGS. 23H and 24H), MG160-37 (FIGS. 23C and 24C), MG160-54 (FIGS. 23D and 24D), and MG160-64 (FIGS. 23G and 24G).

### Example 9. Nucleases for Mediating Short Genomic Corrections in Conjunction with Reverse Transcriptases

[0454] The targetability required for the installation of genomic corrections, insertions, or deletions using RTs can be provided by a nickase. The nickase nicks the non-targeting strand, creating a primer for reverse transcription. The gRNA that accompanies the nickase is a modified version (pegRNA) that consists of a 3′ extension containing the RNA template (RTT) and the PBS. The PBS and the spacer may be complementary to each other, and this complementarity can cause gRNA structural disruption, leading to disruption of pegRNA interaction with its nickase and, ultimately, failure to target the gene of interest. Because each nuclease interacts with its own gRNA, the pegRNA design and requirements will vary from system to system.

[0455] In order to test the versatility of RT candidates in conjunction with nucleases, we tested several RTs with MG3-6 H586A nickase, either untethered or tethered (fused) (FIGS. 25A-25D). A modest level of editing was detected in both tethered and untethered systems. The levels of editing can be improved by optimizing the constructs as well as the delivery methods.

### Example 10. RTs for Programmable Large Cargo Integrations Via Target-Primed Reverse Transcription

[0456] The ability of RT candidates to generate large integrations was tested by their ability to retrotranspose an RNA template containing a GFP cassette that can only produce GFP (and therefore fluorescence) upon successful retrotransposition. The target for retrotransposition is determined by a Cas nuclease.

[0457] RT candidates were cloned into a GFP-based retrotransposition plasmid and isolated for transfection into HEK293T cells. Plasmid transfection was performed using Lipofectamine 2000, while Cas9 mRNA and chemically synthesized guides were transfected using Lipofectamine messenger max. 24 hours later, cells were split into a medium containing Puromycin to select for transfected cells expressing the plasmid. Three, six, and eight days later, cells were flowed on a cell sorter, and the percentage of GFP positive cells in the population was quantified.

[0458] MG candidates MG153-18 and MG153-20 showed GFP fluorescence increasing from D3 to D6, above the non-targeting background, indicating successful retrotransposition in the VEGFA gene (FIGS. 26A-26C). These results show that the MG RTs are capable of long (>1 kb) targeted integrations in the human genome.

### Example 11. Prime Editing of Engineered RTs

[0459] Reverse transcriptase (RT) candidates from the MG151 family, MG160 and MG153 families, were cloned into a plasmid where expression of RT candidate is driven by the CMV promoter. The plasmid was then isolated for transfection in HEK293T cells. Another plasmid containing a nickase spCas9 (H840A) driven via CMV promoter, and the RT containing plasmid were cotransfected. Chemically synthesized pegRNA containing the desired edit in the RT template was transfected. All components (plasmids and pegRNAs) were reverse transfected into 150,000 HEK293T cells in a 24 well plate. 72 hours post transfection, cells were lysed in 100 μL of solution. Primers containing barcodes for next generation sequencing (NGS) were used to amplify a ˜250 bp target. PCR clean up was then performed and samples were sent for NGS sequencing. FASTQ files were then processed using prime editing to determine the percentage of reads with desired change.

[0460] Data is seen in FIGS. 27A-27C. G-T transversion in the VEGFA gene is shown for 3 RTs from different families across multiple sizes of primer binding sites (PBS length). The ultra small MG160-4 candidate outperformed MMLV WT (PE1) and performed closely similar to the gold standard MMLV pentamutant (PE2). The MG151-98 candidate in its WT form performed closely to PE1. The mid size 153-53 candidate outperformed PE1 across a variety of PBS lengths. Moreover, MG151-98 was subjected to rational engineering to install beneficial mutations observed in other RTs. Various point mutations by themselves or combined, as well as truncations of the RNaseH domain were evaluated. Mutations H171N, K297P and trimming the last 166 aa of MG151-98 improved prime editing efficiency, with some of those mutations outperforming MMLV pentamutant.

### Example 12. Processive RT for Large RNA-Templated Integrations

[0461] The ability of candidate reverse transcriptase enzymes to produce cDNA in a mammalian environment was tested by expressing them in mammalian cells and detecting cDNA synthesis by qPCR. Reverse transcriptases were cloned in a plasmid for mammalian expression under the CMV promoter. A 4 kb RNA template was generated by in vitro transcription and hybridized to a DNA primer.

[0462] A plasmid containing MCP fused to the RT candidate under CMV promoter was cloned and isolated for transfection in HEK293T cells. Transfection was performed using lipofectamine 2000. mRNA codifying dCas9 fused to nanoluciferase was made. In order to degrade any DNA template left in the mRNA preparation the reaction was treated DNase for 1.5 hour and the mRNA was cleaned. The mRNA was hybridized to a complementary DNA primer in 10 mM Tris pH 7.5, 50 mM NaCl at 95 C for 2 min and cooled to 4 at the rate of 0.1 C/s. The mRNA/DNA hybrid was transfected into HEK293T cells 6 hours after the plasmid containing the MCP-RT fusion was transfected. 18 hours post mRNA/DNA transfection cells were lysed using solution, 100 ul of quick extract is added per 24 well in a 24 well plate. The RNA template was ˜4247 nt. Primers to amplify first and last 100 bps products from the newly synthesized cDNA (4100 bp) were designed, along with TaqMan probes to quantify their amplification.

[0463] Data is seen in FIG. 28. Activity for the control GII intron RT TGIRT, the retroviral MMLV (WT and penta-mutant) as well as a positive control for R2, R2Tg, was detected, as shown by an early amplification of the first and last 100 bp products. As expected for a low processivity RT, the retroviral RTs (MMLVs) show high amplification levels of the first 100 bps (FAM signal) but the levels at which they complete cDNA synthesis (the last 100 bps) is lower (20 fold lower than first 100 bp, as observed by the FAM/HEX ratio signal). Group II intron-derived RTs such as MG153-18, MG153-20, MG153-51, MG153-56, MG170-1 and R2 non-LTR retrotransposon RTs such as MG140-3, MG140-8, and MG140-46 show a closer FAM/HEX ratio, demonstrating their high processivity.

### Example 13. RTs for Short Corrections, Small Insertions, and Deletions

Testing Reverse Transcriptases Tethered to spCas9(H840A) Nickase

[0464] RT candidates were cloned into a plasmid containing the nickase spCas9(H840A) (SEQ ID NO: 1247) to generate a RT-nickase fusion. The CMV promoter drove the expression of the fusion protein, which contained a 33 amino acid linker (SEQ ID NO: 103) between the nickase and the RT candidate (SEQ ID NOs: 1250-1279). The fusion protein was then transfected into HEK293T cells. Chemically synthesized pegRNA (SEQ ID NOs: 656-679) containing the desired edit in the RT template was transfected. All components (plasmid and pegRNAs) were reverse transfected into 50,000 HEK293T cells in a 24 well plate. 72 hour post transfection, cells were lysed in 100 μL of extraction solution. Primers containing barcodes for next generation sequencing (NGS; SEQ ID NOs: 100-101) were used to amplify a ˜250 bp target (SEQ ID NO: 102). PCR clean-up was then performed and samples were sent for NGS sequencing. FASTQ files were then processed using the prime editing setting to determine the percentage of reads with desired change.

### Results

[0465] MG160 candidates tethered to spCas9(H840A) were tested for G-to-T conversion on the VEGFA target in HEK293T cells (FIGS. 29A-29DD). Percent editing for each RT with pegRNAs at varying PBS lengths (2, 4, 6, 8, 10, 13, 16, and 20 nucleotides, SEQ ID NOs: 656-679) is shown in FIGS. 29A-29DD. Editing levels for each RT candidate represent a single biological replicate. MG160-473, MG160-283, MG160-379, MG160-395 and MG160-107 (SEQ ID NOs: 1206, 1017, 1112, 1128 and 841) showed equivalent or improved editing efficiency relative to the control spCas9(H840A) tethered to MMLV WT (FIGS. 29A, 29G, 29L, 29O, and 29CC, respectively). Furthermore, candidate MG160-473 (SEQ ID NO: 1206) editing levels were comparable to the control spCas9(H840A) (SEQ ID NO: 1247) tethered to the hyperactive mutant MMLV (MMLV2, PE2) (SEQ ID NO: 1249; FIG. 29A). Additionally, candidates MG160-46, MG160-9, MG160-21, MG160-419, MG160-99 and MG160-279 (SEQ ID NOs: 1251, 1265, 1270, 1271, 1274 and 1279) showed activity above background (FIGS. 29B, 29P, 29U, 29V, 29Y and 29DD respectively). The five MG160 candidates with high G-to-T conversion were then repeated to confirm G-to-T conversion (FIG. 30A), as well as for their ability to perform a 24 nucleotide insertion (FIG. 30B) and 15 nucleotide deletion (FIG. 30C) with chemically synthesized pegRNAs ranging from PBS lengths of 6, 8, 10, and 13 nucleotides (SEQ ID NOs: 76-99). MG160-283, MG160-379, MG160-395 and MG160-107 (SEQ ID NOs: 1017, 1112, 1128 and 841) showed similar editing levels to control MMLV WT (SEQ ID NO: 1248) for all desired edits, while candidate MG160-473 (SEQ ID NO: 1206) exhibited high editing levels, comparable to the hyperactive mutant MMLV2 (SEQ ID NO: 1249) for G-to-T conversion and 24 nucleotide insertion.

Testing Reverse Transcriptase Candidates Untethered from the Cas Nickase

[0466] Reverse transcriptase (RT) candidates from diverse retron families MG155, MG156, MG157, MG159, and MG173, and from MG Group II intron families MG164, MG166, MG167 and MG169 (SEQ ID NOs: 1280-1294) were cloned into a plasmid with a CMV promoter driving expression of RT. The plasmid was then isolated for transfection in HEK293T cells. Another plasmid containing a nickase spCas9 (H840A) (SEQ ID NO: 1247) driven by a CMV promoter and the RT containing plasmid were cotransfected. Chemically synthesized pegRNA (SEQ ID NOs: 656-679) containing the desired edit in the RT template was transfected. All components (plasmids and pegRNAs) were reverse transfected into 50,000 HEK293T cells in a 24 well plate. 72 h post transfection, cells were lysed in 100 pL solution. Primers containing barcodes for NGS (SEQ ID NOs: 100-101) were used to amplify a ˜250 bp target (SEQ ID NO: 102). PCR clean-up was then performed, and the samples were sent for NGS sequencing. FASTQ files were then processed using the prime editing setting to determine the percentage of reads with the desired change.

### Results

[0467] Untethered retron candidates from families MG155, MG156, MG157, MG159 and MG173 were tested for a G-to-T change using pegRNAs with varying PBS lengths (2, 4, 6, 8, 10, 13, 16, and 20 nucleotides; SEQ ID NOs: 76-83; FIGS. 31A-31K). In a single biological replicate experiment, retron RT candidates MG173-1 (SEQ ID NO: 627; FIG. 31J) and MG173-2 (SEQ ID NO: 628; FIG. 31K) showed editing levels reaching about 4.5% at PBS 8 and 1.5% at PBS 13, respectively, and had editing levels above background at various PBS lengths. Editing levels above the background were also seen for MG155-3 (SEQ ID NO: 504; FIG. 31A), MG155-5 (SEQ ID NO: 506; FIG. 31C), and MG156-1 (SEQ ID NO: 507; FIG. 31D).

[0468] Untethered Group II intron families, MG164, MG166, MG167 and MG169 were tested with editing levels shown in FIGS. 32A-32D. Most of these candidates did not show detectable activity, but some editing above the background was seen for MG169-1 (SEQ ID NO: 601) at varying PBS lengths (FIG. 32D).

### Example 14. Short Corrections, Small Insertions, and Deletions with Engineered RTs

Editing with Engineered MG160-4 and MG153-53 RT Candidates

[0469] The selected RT candidates MG160-4 (SEQ ID NO: 521) and MG153-53 (SEQ ID NO: 496) were subjected to rational engineering to improve editing efficiencies. Various point mutations (SEQ ID NOs: 1221-1243) were tested individually, as well as combined to determine which engineered candidates could improve editing activity. Different combinations of MG160-4 and MG153-53 mutations tethered (MG160-4) or untethered (MG153-53) to spCas9(H840A) were tested for G-to-T conversion on the VEGFA target using chemically synthesized pegRNAs with PBS lengths of 6, 8, 10, and 13 nucleotides. Primers containing barcodes for NGS (SEQ ID NOs: 100-101) were used to amplify a ˜250 bp target (SEQ ID NO: 102). PCR clean-up was then performed and samples were sent for NGS sequencing. FASTQ files were then processed to determine the percentage of reads with desired change. Single biological replicates were tested alongside untethered controls MMLV1 and MMLV2 (SEQ ID NOs: 1248 and 1249), as well as control RTs TGIRT, Marathon, and Marathon mutant (SEQ ID NOs: 1296-1298).

### Results

[0470] Combining four different point mutations in various combinations for MG160-4 led to a sharp decrease in editing efficiency (FIG. 33A). However, single point mutations H230K (MG160-4 H230K; SEQ ID NO: 1230) and H230R (MG160-4 H230R; SEQ ID NO: 1234) showed a neutral change in editing levels for G-to-T conversion (FIG. 33A). These engineered constructs were further tested for G-to-T transversion (FIG. 33B), as well as for 24 nucleotide insertion (FIG. 33C), and 15 nucleotide deletion (FIG. 33D). As observed in the first replicate, MG160-4-H230K and MG160-4 H230R showed a neutral change in editing levels for G-to-T transversion (FIG. 33B) but an increase in editing levels for MG160-4 H230R (SEQ ID NO: 1230) compared to the wild type MG160-4 for 24 nucleotide insertion (FIG. 33C) and deletion (FIG. 33D). MG160-4 H230R (SEQ ID NO: 1234) showed slightly improved editing compared to engineered MG160-4-H230K (SEQ ID NO: 1230) when editing involved incorporating 24 nucleotide insertions and 15 nucleotide deletions.

[0471] The construct combining all suggested mutations of MG153-53 (SEQ ID NO: 1226) abolished editing activity (FIG. 34). The single point mutation V200R (MG153-53 (V200R); SEQ ID NO: 1225), slightly enhanced G-to-T transversion compared to WT MG153-53 (SEQ ID NO: 496; FIG. 34). WT MG153-53 (SEQ ID NO: 496) did not perform better than controls MMLV1 and MMLV2 (SEQ ID NO: 1248 and 1249), but did outperform control RTs TGIRT, Marathon, and Marathon mutant (SEQ ID NOs: 1296-1298).

### Example 15. Nickases for Mediating Short Corrections, Small Insertions and Deletions in Conjunction with Reverse Transcriptases

[0472] Installing site-directed genomic corrections, insertions, or deletions using RTs requires the RT system to be targetable. This example describes the use of a targetable RT system comprising an RT and a Cas nickase. The Cas nickase guided by a gRNA site-specifically nicks the non-target strand, thus creating a primer for the reverse transcription reaction. The gRNA that accompanies the Cas nickase is a modified version (pegRNA) that comprises a 3′ extension containing the RTT and the PBS. The PBS and the spacer are complementary to each other. It is contemplated that this complementarity can cause gRNA structure disruption, causing the pegRNA to interact with the Cas inhibiting the Cas from finding the target genet. Each Cas nuclease interacts with its own gRNA, as such the pegRNA design and requirements vary from system to system.

### Testing Selected Reverse Transcriptases Untethered and Tethered to MG3-6(H586A) and MG71-2(H883A) Nickases

[0473] An MG3-6(H586A) (SEQ ID NO: 653) or MG71-2(H883A) (SEQ ID NO: 1309) nickase was challenged to introduce genomic corrections with reverse transcriptases on an AAVS1 target site (SEQ ID NO: 654 or 1344). Selected MG RT candidates (SEQ ID NOs: 1295, and 1299-1304) were transfected into HEK293T cells either untethered with the MG3-6(H586A) (SEQ ID NO: 653) plasmid (FIG. 35) or tethered to MG3-6(H586A) (SEQ ID NO: 653) with the selected RTs fused to the N-terminus or C-terminus (FIG. 35). For MG3-6(H586A) (SEQ ID NO: 653) genomic corrections were targeted with chemically synthesized pegRNAs with PBS lengths of 8, 10, 13, and 20 nucleotides (SEQ ID NOs: 682-684, and 686) and for MG71-2(H883A) (SEQ ID NO: 1309) genomic corrections were targeted with chemically synthesized pegRNAs with PBS lengths of 6, 8, 10, 13, 16, and 20 nucleotides (SEQ ID NOs: 1310-1341). Primers containing barcodes for NGS (SEQ ID NO: 698-699 for MG3-6(H586A (SEQ ID NO: 653) or SEQ ID NOs: 1342-1343 for MG71-2(H883A) (SEQ ID NO: 1309)) were used to amplify a ˜250 bp MG3-6(H586A) AAVS1 target (SEQ ID 654) or MG71-2(H883A) AAVS1 target (SEQ ID NO: 1344). PCR clean-up was then performed and samples were sent for NGS sequencing. FASTQ files were then processed using the prime editing setting to determine the percentage of reads with desired change.

### Results

[0474] Above background editing (>0.1%) was seen at PBS lengths 8, 10, 13, and 20 nucleotides for selected RT candidates for G-to-T transversion (FIG. 35). Interestingly, when MG3-6(H586A) (SEQ ID NO: 653) and MMLV WT (MMLV1) (SEQ ID NO: 1248) was tethered to the C-terminus of MG3-6(H586A), editing levels were in general higher than in the untethered approach or when the RT was tethered to the N-terminus of the nickase. When MG3-6(H586A) (SEQ ID NO: 653) and hyperactive mutant MMLV (MMLV2) (SEQ ID NO: 1249) was tethered to the C-terminus of MG3-6(H586A), editing levels were similar in the untethered approach. Contrastingly, MG151-98 engineered mutants (SEQ ID NOs: 1302-1304) resulted in higher levels of editing when either tethered to the N-terminus of MG3-6(H586A) (SEQ ID NO: 653) or in the untethered approach (FIG. 35). MG160-4 (SEQ ID NO: 1295) achieved similar editing levels when either tethered to the N or C terminus of MG3-6(H586A) (SEQ ID NO: 653) but did not have above background editing in the untethered approach. MG153-53 (SEQ ID NO: 1299) with all three different approaches with MG3-6(H586A) (SEQ ID NO: 653) showed no editing activity above background levels (FIG. 35).

[0475] Untethered MG71-2(H883A) (SEQ ID NO: 1309) with selected RTs showed editing levels for various edits including five nucleotide changes (FIGS. 36A-36C, and 36J), single G-to-T nucleotide transversion (FIGS. 36D and 36G), 24 nucleotide insertion (FIGS. 36E and 36I), and 15 nucleotide deletion (FIGS. 36F and 36H). Biological triplicate data for correcting five nucleotide changes in AAVS1 target (SEQ ID NO: 1344) was shown with selected RTs. Untethered MMLV1 and MMLV2 (SEQ ID NOs: 1248 and 1249) with MG71-2(H883A) (SEQ ID NO: 1309) showed high levels of editing for all corrections (FIGS. 36A-36J). MG153-53(SEQ ID NO: 1299) showed above background editing only when trying to correct a 15 nucleotide deletion (FIG. 36F). When comparing FIG. 36B and FIG. 36C, pegRNA scaffold went from four consecutive Ts to a modified scaffold with four consecutive Gs. Editing levels between the original scaffold and modified scaffold did not have any significant changes in editing levels, so the original scaffold was kept when correcting for other changes (insertion, deletion, and SNP). Interestingly, editing levels were higher for correcting a five nucleotide change (FIG. 36B) than a single G-to-T transversion (FIG. 36D). In general, MG71-2(H883A) (SEQ ID NO: 1309) and select RTs (SEQ ID NOs: 1295, and 1299-1301) showed highest editing levels for all corrections when pegRNA PBS lengths were between 8 to 16 nucleotides. Engineered MG151-98 candidates (SEQ ID NO: 1302-1304) were then tested with untethered MG71-2(H883A) (SEQ ID NO: 1309) to correct various changes on the AAVS1 target (SEQ ID NO: 1344; FIGS. 36G-36J). All MG151-98 engineered candidates (SEQ ID NOs: 1302-1304) showed comparable editing levels to MMLV1 and MMLV2 (SEQ ID NOs: 1248 and 1249) for all corrections.

[0476] Both MG3-6(H586A) (SEQ ID NO: 653) and MG71-2(H883A) (SEQ ID NO: 1309) have shown to be effective nickases compatible with RTs reverse transcribing small corrections into genomic targets.

### Example 16. Retron RTs for Programmable, Large Cargo Integrations Mediated by a Single Stranded DNA Transposase (TnpA)

[0477] Retrons are DNA retro-elements that contain a reverse transcriptase (RT) gene located downstream of a conserved non-coding structural RNA. The non-coding RNA consists of two inverted regions, referred to as msr and msd. When the retron RT recognizes the msr folded into a specific secondary structure (specific recognition motifs), it initiates reverse transcription of the msd portion (template), thus producing multicopy of single stranded DNA (ssDNA). Overall, retrons have RT capabilities that are primed by a specific RNA recognition motif (msr), and produces a covalently bound complementary ssDNA molecule. Thus, dependence on recognition motifs in the mrs should reduce off target priming and provide a mechanism for localizing the template RNA/DNA to a specific genomic target.

[0478] Precise genome editing with scarless replacement of alleles or insertion of synthetic sequences requires in vitro delivery of donor DNA. However, many challenges to induce cells to utilize donor DNA to conduct Homology Directed Repair (HDR) exist. For this end, it may be possible that retrons could be harnessed to produce high copy number intracellular DNA molecules in human hosts. Early experiments showed that the msd could be variable and can encode an in-situ DNA with an artificial sequence of interest. Hence, retrons could be repurposed as a source of donor DNA for genome engineering. This biological solution could enable in-nucleo donor generation that would improve the scalability and multiplexing capabilities for genomic knock-ins. Recently, it has been shown that retrons coupled with Cas9 improved the efficiency of precise genome editing via HDR in HEK293T and K563 with HDR rates of up to ˜11%. While these findings represent first steps in retron-based gene editing in human cells, low editing efficiency due to the limitation of HDR in non-cycling cells remains a challenge. Coupling a Retron-Cas9-like fusion with a ssDNA integrase such ssDNA transposase TnpA may circumvent the reliance of the HDR pathway and improve DNA integration. For example, IS200/IS605 transposons are a type of mobile genetic element that integrate ssDNA at specific target sites by a TnpA transposase. TnpA excises a donor by recognizing structural motifs at each donor end, integrating it at a recognized target site accessible as ssDNA.

[0479] The ssDNA produced by a retron RT can be used as a template by TnpA for programmable integration of desired cargo into a specific target site (FIG. 38). Specifically, the retron msd contains the desired cargo (for example, an antibiotic resistance cassette or fluorescent marker) flanked by LE and RE structural motifs recognizable by TnpA. The TnpA transposase excises and circularizes the ssDNA donor, and integration into a target occurs via recognition of a specific motif available through an R-loop formed by the RNA-guided recognition and binding of an engineered (nickase or dead) effector, for example, MG3-6.

### Example 17. Engineering of ncRNAs-Associated Retron RTs to Include LE, RE, and Cleavage Motif of TnpA

Reverse Transcription of Engineered ncRNAs that Contain the LE/RE Motifs of Hp TnpA by Ec86

[0480] Eight engineered variants of the Ec86 ncRNA were designed (SEQ ID NOs: 1346-1353; FIGS. 39-40) using the cryo-EM structure of Ec86 in complex with its product and previous work which has identified a replaceable region of the Ec86 msd stem loop to facilitate homology-directed repair. Insertion sequences of three different lengths were designed, all of which contain the reverse-complement of the left end (LE) and right end (RE) recognition motifs of the H. pylori (Hp) TnpA ssDNA transposase at the 3′ and 5′ flanking regions. The insertion sequence designated at LE40RE contains a 40 nt sequence flanked by the LE and RE of Hp TnpA, giving a total insertion length of 174 nt. The insertion sequence designated at LE200RE and LE500RE contains a 200 nt or 500 nt partial kanamycin gene flanked by the LE/RE motifs, giving a total insertion length of 334 nt and 634 nt, respectively. These three different sequences were inserted at two or three different potential replaceable regions within the msd stem loop (FIG. 40). The version designated as version 1 replaces the entire msd region that was not resolved in the cryo-EM structure of Ec86 bound to its msdDNA with the engineered sequence. Versions 2 and 3 are more progressively more conservative replacement designs, with version 2 replacing the msd region after the a bubble in the msd stem loop, and version 3 retaining most of the msd stem loop for the terminal 8 nucleotides.

[0481] The reverse-complement of the LE and RE motifs of Hp TnpA are predicted to adopt distinct secondary structures within the engineered ncRNAs (FIG. 40). However, the predicted RNA folds do suggest that the key recognition motifs required for recognition by the Ec86 RT, including the terminal inverted repeats and msr hairpins, are maintained, suggesting that the LE/RE motifs of TnpA may not disrupt the fold of key ncRNA features required for priming.

[0482] Reverse transcription of engineered ncRNAs by Ec86 was determined in vitro. The Ec86 RT was co-expressed with the ncRNA substrate (final 100 nM) in a cell-free expression system) supplemented with dNTPs (final 0.3 mM). Expression constructs were codon-optimized for E. coli and contained an N-terminal single Strep tag. After incubation for 2 h at 37° C., the reaction was quenched by heat denaturation at 95° C. for 2 min, followed by treatment by RNase A for 30 min at 37° C. Ec86 activity was assessed by qPCR using primers (SEQ ID NOs: 1354-1355) that amplify either the product generated from the wild-type ncRNA (SEQ ID NO: 1345), or from the engineered 40nt partial kanamycin gene (SEQ ID NOs: 1356-1357) or 200nt and 500nt partial kanamycin gene (SEQ ID NOs: 1358-1359). The resulting reverse transcription products, herein referred to as msdDNA, were diluted prior to qPCR to ensure msdDNA concentrations were within the linear range of detection. The amount of msdDNA was quantified by extrapolating values from a standard curve generated with a DNA template of known concentrations. Based on these results, Ec86 RT was capable of producing appreciable amounts of msdDNA from all eight engineered ncRNA designs and at levels comparable to that of the wild-type ncRNA (FIG. 41). This data indicates that Ec86 is tolerant to insertions as large as 634 nt at 3 different replaceable regions within the msd stem loop.

Insertion of ssDNA Produced by Retron RT Ec86 by Hp TnpA

[0483] Insertion of ssDNA produced by a retron by Hp TnpA was determined. Briefly, Ec86 was co-expressed the engineered ncRNA substrate (LE200RE_v1/v3 or LE500RE_v1/v2/v3) in a cell-free expression system as described above, followed by quenching by heat denaturation and RNase A treatment, also as described above. RNase A treatment removes any RNA in heteroduplex with the generated msdDNA, thereby making the product available as ssDNA for TnpA. Subsequently, the generated ssDNA, which contained the LE/RE motifs of Hp TnpA, was mixed with Hp TnpA protein that was also generated in a cell-free expression system in reaction buffer containing 20 mM HEPES (pH 7.5), 160 mM NaCl, 5 mM MgCl₂, 5 mM TCEP, 20 g/mL BSA, 0.5 pg/mL of poly-dIdC, and 20% glycerol. The reaction also contained 50 nM of a ssDNA insertion target which included the Hp TnpA targeting motif (TTAC). The TnpA insertion reaction was allowed to proceed for 1 hour at 37° C., after which successful insertion by TnpA was confirmed by PCR of the chimeric product (expected amplicon size of ˜300 bp) using primers that anneal to the partial kanamycin gene cargo and the ssDNA target (SEQ ID NOs: 1360-1361). Insertion was further confirmed by Sanger sequencing. Based on these results, Hp TnpA can insert ssDNA produced by Ec86 from all of the 5 engineered ncRNAs tested (LE200RE_v1/v3 and LE500RE_v1/v2/v3) and in a manner that is both RT- and TnpA-dependent (FIGS. 42-43).

MG154-159 and MG173 Family Tolerance to Insertion within the Msd of the ncRNA

[0484] Based on the predicted secondary structure of the ncRNA, the msd stem loop was identified as the first 3′ hairpin adjacent to the inverted repeat. One or two versions of replaceable regions of the msd were identified and a ˜200nt sequence encoding a partial kanamycin gene was inserted (FIGS. 44-51; SEQ ID NOs: 1362-1393). For the cases indicated, both trimmed and untrimmed versions of the ncRNA were also designed and tested (FIG. 46). To evaluate if the retron is tolerant to insertions within the msd stem loop, the corresponding retron RT was co-expressed with the engineered ncRNA in a cell-free expression system supplemented with dNTPs, followed by heat denaturation and RNase A treatment as described above. The resulting msdDNA was then diluted prior to qPCR to ensure concentrations were within the linear range of detection. qPCR was performed using primers that amplify the partial kanamycin sequence. The amount of msdDNA was quantified by extrapolating values from a standard curve generated with a DNA template of known concentrations. Retron RTs were considered active if msdDNA production was greater than 10-fold above the no RT background control. Based on these results, the following retron systems are tolerant to insertion of the msd (FIG. 52): MG155-2, MG155-3, MG155-4, MG155-5, MG156-1, MG156-2, MG157-1, MG157-3, MG157-4, MG157-5, MG158-1, MG159-1, MG159-2, MG159-3, MG173-1, and MG173-2.

### Example 18. RTs for Short Corrections, Small Insertions, and Deletions

### Reverse Transcriptase Candidates Untethered or Tethered to MG71-2(H883A) Nickase

[0485] RT candidates (SEQ ID NOs: 1234, 1249-1250, and 1304) in the tethered system were cloned into a plasmid containing the nickase MG71-2(H883A) (SEQ ID NO: 1309) to generate a RT-nickase fusion (RT either on the C- or N-termini for MG71-2 (H883A)). The CMV promoter drove the expression of the fusion protein, which contained a 33 amino acid linker (SEQ ID NO: 103) between the nickase and the RT candidate. The fusion protein was then transfected into HEK293 T cells with liposomes. In the untethered system, RTs were cloned into a plasmid with a CMV promoter driving expression of RT. Another plasmid containing a nickase MG71-2(H883A) driven by a EF1α promoter and the RT containing plasmid were co-transfected using liposomes. Chemically synthesized pegRNAs (SEQ ID NOs: 1310-1315) containing the desired edit in the RT template were transfected using liposomes targeting AAVS1. All components (plasmid and pegRNAs) were reverse transfected into 50,000 HEK293T cells in a 24 well plate. 72 hour post transfection, cells were lysed. Primers containing barcodes for next generation sequencing (NGS) (SEQ ID NOs: 1342-1343) were used to amplify a ˜250 bp target (SEQ ID NO: 1344) with PCR. Samples were purified and sequenced. Sequencing data was processed to determine the percentage of reads with desired change.

[0486] Engineered MG151-98 (K297P, Δ166AA) (SEQ ID NO: 1304) and MMLV2 (SEQ ID NO: 1249) were tested either untethered or tethered to MG71-2(H883A) (RT on C-term of MG71-2(H883A) (nickase-RT) or N-term of MG71-2(H883A) (RT-nickase)) (FIGS. 53A-53B). MG160-4 (H230R) (SEQ ID NO: 1234) and MG160-473 (SEQ ID NO: 1250) were tested tethered to MG71-2(H883A) (RT on C-term of MG71-2(H883A) (nickase-RT) or N-term of MG71-2(H883A) (RT-nickase)) (FIGS. 53C-53D). RTs were challenged to incorporate a 5 nucleotide change on the AAVS1 target (SEQ ID NO: 1344). The RTs were transfected alongside pegRNAs with PBS lengths varying (SEQ ID NOs: 1310-1315), and the data shown in FIG. 53 represents the highest levels of editing for each RT at each RT nickase configuration. MG71-2(H883A) untethered with MMLV2 and MMLV2 tethered to the N-terminus of MG71-2(H883A) showed the highest levels of editing compared to MMLV2 tethered to the C-terminus of MG71-2(H883A) (FIG. 53A). Similar results were shown for MG151-98 (K297P, Δ166AA) (SEQ ID NO: 1304) (FIG. 53B). It has previously been shown that candidates from the MG160 family show little to no activity in an untethered system. Engineered MG160-4(H230R) (SEQ ID NO: 1234) and MG160-473 (SEQ ID NO: 1250) were tested tethered to either the N-terminus or C-terminus of MG71-2(H883A). MG160-4(H230R) tethered to the N-terminus of MG71-2(H883A) gave substantially higher levels of editing than when tethered to the C-terminus of MG71-2(H883A) (FIG. 53C). MG160-473 also showed the highest levels of editing when tethered to the N-terminus of MG71-2(H883A) (FIG. 53D). Data shown in FIG. 53 represents the “correct edit” indicating intended correction with no errors found in the NGS amplicon. The “incorrect edit” refers to the intended edit being incorporated but includes errors within the NGS amplicon, either originating in misincorporation by the RT and/or scaffold incorporation of the pegRNA. The data shows that MG71-2(H883A) has a strong preference for RTs on the N-terminus. Further, it has been demonstrated that MG RTs outperform literature controls in terms of efficiency and accuracy.

### Example 19. RTs for Short Corrections, Small Insertions and Deletions

Testing Reverse Transcriptase Candidates Untethered to spCas9(H840A) Nickase

[0487] RT candidates (SEQ ID NOs: 1394-1402) in the untethered system were cloned into a plasmid with a CMV promoter driving expression of RT. Another plasmid containing a nickase spCas9(H840A) (SEQ ID NO: 1247) driven by an EF1α promoter and the RT containing plasmid were cotransfected by lipofection. Chemically synthesized pegRNAs (SEQ ID NOS: 76-83) containing the desired edit in the RT template targeting VEGFA (SEQ ID NO: 102) were transfected by high efficiency lipofection. All components (plasmid and pegRNAs) were reverse transfected into 50,000 HEK293T cells in a 24 well plate. 72 hour post transfection, cells were lysed in 100 μL of a DNA extraction solution. Primers containing barcodes for next generation sequencing (NGS) (SEQ ID NOs: 100-101) were used to amplify a ˜250 bp target (SEQ ID NO: 102) with a high fidelity polymerase and reaction solution. PCR clean-up was then performed and samples were sent for NGS sequencing. FASTQ files were then processed to determine the percentage of reads with the desired change.

[0488] Eight candidates from the MG173 family (SEQ ID NOs: 1394-1401) and one candidate from the MG192 family (SEQ ID NO: 1402) were tested for G-to-T transversion on the VEGFA target (SEQ ID NO: 102) using pegRNAs with PBS lengths varying from 2 to 20 nucleotides and untethered spCas9(H840A) (SEQ ID NO: 1247) (FIG. 54). Reverse transcriptase candidates having editing levels above background (>0.1%) included MG173-3 (SEQ ID NO: 1394), MG173-8 (SEQ ID NO: 1399), MG173-9 (SEQ ID NO: 1400), and MG173-10 (SEQ ID NO: 1401), while the other retron candidates (SEQ ID NOs: 1395-1398 and 1402) were not active for G-to-T transversion (FIG. 54A). Percent editing was then broken down further to determine “correct edit”, “incorrect edit”, “editing”, and “scaffold incorporation” (FIGS. 54B-54S). “Correct edit” represents the intended edit with no mistakes in the NGS amplicon, while “incorrect edit” refers to the intended edit being incorporated and includes errors within the NGS amplicon, either originating in misincorporation by the RT and/or scaffold incorporation of the pegRNA. “Editing” refers to the intended edit with errors in the NGS amplicon (excluding pegRNA scaffold incorporation) and “scaffold incorporation” indicates the intended edit and scaffold incorporation of the pegRNA. MG173-8 (SEQ ID NO: 1399) showed the highest levels of editing compared to the other retron candidates (FIGS. 54A, 54G, and 54P) with the highest level of percent editing between PBS 8 through 13 nucleotides (SEQ ID NOS: 79-81).

Testing Reverse Transcriptase Candidates Tethered to spCas9(H840A) Nickase

[0489] RT candidates (SEQ ID NOs: 1403-1424) in the tethered system were cloned into a plasmid containing the nickase spCas9(H840A) (SEQ ID NO: 1247) to generate an RT-nickase fusion. The CMV promoter drove the expression of the fusion protein, which contained a 33 amino acid linker (SEQ ID NO: 103) between the nickase and the RT candidate. Transfection of these constructs, along with chemically synthesized pegRNAs, followed the transfection protocol and NGS sample preparation and data analysis mentioned above.

[0490] Twenty-two MG160 candidates (SEQ ID NOs: 1403-1424) were tested tethered to spCas9(H840A) (SEQ ID NO: 1247) for G-to-T transversion on the VEGFA target (SEQ ID NO: 102) across eight different pegRNAs with varying PBS lengths (SEQ ID NOS: 76-83) (FIG. 55A). Candidates that did not show activity above background under the tested conditions (>0.1%) were MG160-50 (SEQ ID NO: 1409) (FIGS. 550 and 55AK), MG160-114 (SEQ ID NO: 1404) (FIGS. 55E and 55AA), MG160-210 (SEQ ID NO: 1412) (FIGS. 55H and 55AD), MG160-306 (SEQ ID NO: 1418) (FIGS. 55U and 55AQ), MG160-416 (SEQ ID NO: 1422) (FIGS. 55M and 55AI), and MG160-483 (SEQ ID NO: 1424) (FIGS. 55W and 55AS). MG160 candidates with high levels of activity for G-to-T transversion include MG160-45 (SEQ ID NO: 1423) (FIGS. 55D and 55Z), MG160-121 (SEQ ID NO: 1405) (FIGS. 55F and 55AB), MG160-136 (SEQ ID NO: 1407) (FIGS. 55G and 55AC), MG160-193 (SEQ ID NO: 1410) (FIGS. 55R and 55AN), MG160-232 (SEQ TD NO: 1407) (FIGS. 55J and 55AF), and MG160-358(SEQ ID NO: 1419) (FIGS. 55V and 55AR). MG160-136 (SEQ ID NO: 1407) reached editing levels above 5% for PBS lengths of 6-20 nucleotides (SEQ ID NOS: 78-83), with the highest level of editing at PBS 8 (SEQ ID NO: 79) reaching ˜15% editing for G-to-T transversion (FIGS. 55G and 55AC). Percent editing was then broken down further to determine “correct edit”, “incorrect edit”, “editing”, and “scaffold incorporation” (terms described in detail above) (FIGS. 55B-55AS).

### Example 20. Short Corrections, Small Insertions and Deletions with Engineered RTs

Testing Engineered Reverse Transcriptase Candidates Untethered or Tethered to spCas9(H840A) Nickase

[0491] Selected RT candidates were subjected to rational engineering to improve editing efficiencies. Various point mutations were tested individually as well as combined to determine which engineered candidates could improve editing activity. The selected RT candidates and engineered mutants (MG151-98 (SEQ ID Nos: 1300 and 1302-1304), MG151-123 (SEQ ID NOs: 715, and 1426-1431), MG151-126 (SEQ ID NOs: 718, and 1433-1438), MG153-18 (SEQ ID Nos: 55 and 1439-1441), and MG153-20 (SEQ ID Nos: 57 and 1442-1444)) were tested untethered to spCas9(H840A) (SEQ ID NO: 1247), while MG160-473 (SEQ ID NO: 1250) and mutants (SEQ ID Nos: 1445-1446) were tested tethered to spCas9(H840A) (SEQ ID NO: 1247). Using chemically synthesized pegRNAs with varying PBS lengths and RTT (SEQ ID NOS: 78-81, 86-90, and 94-98), engineered reverse transcriptases were challenged to versatile edits (transversion, insertion, and deletion) on the VEGFA target (SEQ ID NO: 102). Engineered reverse transcriptases were tested either untethered or tethered to spCas9(H840A) (SEQ ID NO: 1247) using the same transfection protocol and NGS preparation and data analysis described in Example 19.

[0492] MG151-98 wild type (SEQ ID NO: 1300) and engineered mutants MG151-98 (Δ166AA) (SEQ ID NO: 1302), MG151-98 (H171N, Δ166AA) (SEQ ID NO: 1303), and MG151-98 (K297P, Δ166AA) (SEQ ID NO: 1304) were tested untethered with spCas9(H840A) (SEQ ID NO: 1247) for G-to-T transversion (FIGS. 56A and 56D), 24 nucleotide insertion (FIGS. 56B and 56E), and 15 nucleotide deletion (FIGS. 56C and 56F) on the VEGFA target (SEQ ID NO: 102) using pegRNAs with PBS lengths of 6, 8, 10, and 13 nucleotides (SEQ ID NOS: 78-81, 86-90, and 94-98). Trimming 166 amino acids from the C-terminus of MG151-98 (MG151-98 (Δ166AA) (SEQ ID NO: 1302)) resulted in no significance difference in editing levels compared to wild type (SEQ ID NO: 1300) across three different type of edits (FIG. 56). Further, single point mutants H171N and K297P combined with 166AA trimmed off the C-terminus of the reverse transcriptase (SEQ ID Nos: 1303-1304) enhanced editing compared to wild type MG151-98 (SEQ ID NO: 1300) and brought editing levels above MMLV1 (SEQ ID NO: 1248) and comparable to MMLV2 (SEQ ID NO: 1249) for some types of edits (FIG. 56). Percent editing was broken down further to determine “correct edit”, “incorrect edit”, “editing”, and “scaffold incorporation” (terms described in detail in Example 19). Even with engineered mutants of MG151-98 (SEQ ID Nos: 1302-1304) improving editing levels, there was no significant difference in “incorrect edit” and “scaffold incorporation” compared to wild type (FIG. 56).

[0493] Wild type and engineered mutants of MG151-123 (SEQ ID NOs: 715, 1426-1431), MG151-126 (SEQ ID NOs: 718, and 1433-1438), MG153-18 (SEQ ID Nos: 55 and 1439-1441), and MG153-20 (SEQ ID Nos: 57 and 1442-1444) were tested for G-to-T transversion on VEGFA target (SEQ ID NO: 102) using pegRNAs with PBS lengths of 6, 8, 10, and 13 nucleotides (SEQ ID NOS: 78-81, 86-90, and 94-98) (FIG. 57). An MG151-123 mutant, MG151-123 (H178N) (SEQ ID NO: 1429), showed editing levels that improved at PBS 8 and PBS 10 compared to wild type MG151-123 (SEQ ID NO: 715) (FIGS. 57A and 57E). Other point mutations, M304R, H287F, H178R, G279R, and G279N for MG151-123 (SEQ ID Nos: 1426-1428 and 1430-1431) either significantly decreased or abolished activity for G-to-T transversion (FIGS. 57A and 57E). MG151-126 (SEQ ID NO: 718) and point mutations (SEQ ID Nos: 1433-1438) showed much lower editing levels compared to MG151-123 (SEQ ID NO:715) and were not comparable to MMLV1 (SEQ ID NO: 1248) or MMLV2 (SEQ ID NO: 1249) (FIGS. 57B and 57F). Further, for MG153-18 (SEQ ID NO: 55) and MG153-20 (SEQ ID NO: 57), single point mutations (SEQ ID Nos: 1439-1440 and 1442-1443) and double point mutations (SEQ ID Nos: 1441 and 1444) showed no editing levels above background when tested for G-to-T transversion (FIGS. 57C, 57D, 57G, and 57H).

[0494] MG160-473 wild type (SEQ ID NO: 1250) and point mutants MG160-473 (F231R) (SEQ ID NO: 1445) and MG160-473 (F231K) (SEQ ID NO: 1446) were tested for G-to-T transversion (FIGS. 58A, 58D, 58G, and 58J), 24 nucleotide insertion (FIGS. 58B, 58E, 58H, and 58K), and 15 nucleotide deletion (FIGS. 58C, 58F, 58I, and 58L) on the VEGFA target (SEQ ID NO: 102) using pegRNAs with PBS lengths of 6, 8, 10, 13, and 16 nucleotides (SEQ ID NOS: 78-82, 86-90, and 94-98). Single point mutations (SEQ ID Nos: 1445-1446) did not result in improvements on editing levels compared to wild type MG160-473 (SEQ ID NO: 1250). MG160-473 (SEQ ID NO: 1250) outperformed tethered MMLV1 (SEQ ID NO: 1248) for all edits and showed comparable levels of editing for transversion compared to MMLV2 (SEQ ID NO: 1249) (FIG. 58).

### Example 21. Nickases for Mediating Short Corrections, Small Insertions and Deletions in Conjunction with Reverse Transcriptases

[0495] Installing genomic corrections, insertions, or deletions using RTs require the system to be targetable. The targetability of the system is given by the use of a Cas nickase. The Cas nickase nicks the non-target strand, creating a primer for reverse transcription. The gRNA that accompanies the Cas nickase is a modified version (pegRNA) that consists of a 3′ extension containing the RTT and the PBS. The complementarity of the PBS and the spacer can result in gRNA structure disruption, causing the pegRNA to interact with the Cas and thus inhibiting the Cas from finding the target gene. Because each Cas nuclease interacts with its own gRNA, the pegRNA design and requirements vary from system to system.

Optimizing MG71-2(H883A) Nickase with MG Reverse Transcriptases

[0496] An MG71-2(H883A) nickase (MG71-2n) (SEQ ID NO: 1309) was challenged to introduce genomic corrections (a five nucleotide change, G-to-T transversion, a 24 nucleotide insertion, and a 15 nucleotide deletion) on an AAVS1 target site (SEQ ID NO: 1344) with selected MG reverse transcriptase candidates (FIGS. 59-61). Reverse transcriptases were tested either untethered with MG71-2n, tethered to the C-terminus of MG71-2n, or tethered to the N-terminus of MG71-2n with a 33 AA linker (SEQ ID NO: 103). A similar procedure to the transfection and preparation of NGS samples protocols described in Example 19 was used with the exception of different pegRNAs with PBS lengths 6 through 20 nucleotides (SEQ ID NOS: 1310-1315 and 1324-1341) and NGS primers (SEQ ID Nos: 1342-1343) to target the AAVS1 site with MG71-2n. Optimization of pegRNAs by modifying the scaffold of the pegRNA and incorporating mismatches in the PBS sequence was tested to determine if editing levels could be improved.

[0497] Selected reverse transcriptases MMLV1 (SEQ ID NO: 1248; FIGS. 59A and 59D), MMLV2 (SEQ ID NO: 1249; FIGS. 59B and 59E), MG160-4 (SEQ ID NO: 1295; FIGS. 59C and 59F), MG151-98(Δ166AA) (SEQ ID NO: 1302; FIGS. 59G and 59J), MG151-98(H178N, Δ166AA) (SEQ ID NO: 1303; FIGS. 59H and 59K), MG151-98(K297P, Δ166AA) (SEQ ID NO: 1304; FIGS. 59I and 59L), MG160-4 (H230R) (SEQ ID NO: 1234; FIGS. 59M and 59O), and MG160-473 (SEQ ID NO: 1250; FIGS. 59N and 59P) were tested either untethered or tethered to MG71-2n across six different PBS lengths (6, 8, 10, 13, 16, or 20 nucleotides) containing a reverse transcription template (RTT) encoding a five nucleotide change. In general, when using a tethered approach for MG71-2n, the reverse transcriptase on the N-terminus of MG71-2n showed higher levels of editing when compared to the reverse transcriptase on the C-terminus of MG71-2n (FIG. 59). Different reverse transcriptase candidates demonstrated preference for being tethered or untethered (FIG. 59). For example, MG160 family candidates MG160-4, MG160-4 (H230R), and MG160-473 showed much higher levels of editing when tethered compared to the untethered format (FIGS. 59C, 59F, and 59M-59P). In contrast, MG151-98 (Δ166AA) and MG151-98 (H178N, Δ166AA) showed higher levels of editing when untethered to MG71-2n (FIGS. 59G-59L), which may be due to the use of a non-optimal linker for MG151-98 (SEQ ID NO: 1300). In general, MG reverse transcriptases have fewer errors and scaffold incorporation than MMLV1 and MMLV2 when targeting this region of AAVS1 with MG71-2n.

[0498] MG160-4 and MG160-4 (H230R) tethered to the N-terminus of MG71-2n was then tested to incorporate a G-to-T transversion, a 24 nucleotide insertion, a 15 nucleotide deletion, and a five nucleotide change on an AAVS1 target site using pegRNAs with PBS lengths of 8, 10, 13, and 16 nucleotides (FIGS. 60A-60H). MG160-4 (H230R) outperformed or was comparable to wild type MG160-4 depending on the intended correction. In addition, MG160-4 and MG160-4 (H230R) were comparable to or had improved editing levels compared to MMLV1 or MMLV2 tethered to the N-terminus of MG71-2n. MG160 candidates were tested untethered at only PBS 13 for all edits and in all cases, tethered MG160 candidates had higher activity when tethered than untethered. Interestingly, when performing a deletion correction, scaffold incorporation was much higher than other types of edits (FIG. 60G). However, when a reverse transcriptase was tethered to MG71-2n, scaffold incorporation seemed to decrease.

[0499] Engineered mutants of MG151-98 (H178N, Δ166AA), MG151-98 (K297P, Δ166AA), and MG151-98 (H178N, K297P, Δ166AA) (SEQ ID NO: 1447) untethered with MG71-2n showed successful editing for G-to-T transversion, a 24 nucleotide insertion, a 15 nucleotide deletion, and a five nucleotide change on the AAVS1 target site using pegRNAs with PBS lengths of 8, 10, 13, and 16 nucleotides (FIGS. 61A-61L). When compared to MMLLV1 and MMLV2 untethered to MG71-2n, the engineered MG151-98 RTs showed similar levels of editing for all corrections (FIGS. 61A-61L). When looking at the average median percent editing for each correction, single point mutant, MG151-98 (H178N, Δ166AA), MG151-98 (K297P, Δ166AA), and double mutant MG151-98 (H178N, K297P, Δ166AA) all had very similar levels of editing (FIGS. 61I-61L). A 15 nucleotide deletion continued to have the largest amount of scaffold incorporation compared to the other corrections (FIG. 61G).

[0500] The original guide RNA for MG71-2 contains a 107 nucleotide sequence (SEQ ID NO: 1448) and a 24 nucleotide spacer. Two modified versions of the scaffold were designed: D2 (SEQ ID NO: 1449) and D2C2 (SEQ ID NO: 1450). Modified scaffold D2 removes the last hairpin in the scaffold resulting in a scaffold length of 85 nucleotides. Modified scaffold D2C2 removes the last hairpin of the original scaffold design in addition to a neighboring bulge resulting in a 79 nucleotide modified scaffold. Editing levels for a five nucleotide change were tested using constructs MMLV2 or MG160-4(H230R) tethered to the N-terminus of MG71-2n and modified pegRNAs with PBS lengths 8, 10, 13, and 16 nucleotides (SEQ ID NOs: 1451-1458) (FIG. 62). At PBS lengths 10 and 13 nucleotides, a clear improvement in increased editing levels for both tethered constructs showed higher editing levels with the smaller, modified scaffold (FIG. 62). Further, percent editing analyzed by “correct edit” and “incorrect edit” (FIG. 62A) and analyzed by “editing” and “scaffold incorporation” (FIG. 62B) showed no significant change with modified scaffold designs with respect to the original scaffold.

[0501] Due to high complementarity between the PBS sequence and the spacer sequence of the pegRNA, incorporation of mismatches in the PBS sequence could help facilitate higher editing levels of an intended edit. Modified mismatched pegRNAs (SEQ ID NOs: 1459-1462) for MG71-2n were designed to have eight nucleotides neighboring 3′ of the RTT having an exact match in nucleotide sequence to the target. After these eight nucleotides, mismatches were incorporated to reach the next PBS length of the pegRNA (PBS 10: 2 mismatches, PBS 13: 5 mismatches, PBS 16: 8 mismatches, and PBS 20: 12 mismatches) (SEQ ID NOs: 1459-1462). MG71-2n and untethered selected RTs (MMLV1, MMLV2, MG151-98 (H178N, Δ166AA), MG151-98 (K297P, Δ166AA), and MG151-98 (H178N, K297P, Δ166AA)) had significantly lower levels of editing when the PBS of the pegRNA contained mismatches (FIGS. 63B and 63D) compared to a PBS sequence with exact complementarity (FIGS. 63A and 63C). This was also true for selected RTs (MMLV1, MMLV2, MG160-4, and MG160-4(H230R)) tethered to the N-terminus of MG71-2n (FIGS. 63E-63H).

Optimizing MG3-6(H586A) Nickase with MG Reverse Transcriptases

[0502] To improve editing levels with selected MG RTs and MG3-6(H586A) (SEQ ID NO: 653), the scaffold sequence and the PBS sequence of the pegRNA were modified to have a varying level of GC content in stem loops of the scaffold and mismatches in the PBS sequence. A similar procedure to the above transfection and preparation of NGS samples protocols was used with the exception of different pegRNAs (SEQ ID NOs: 112-113, 116, and 1463-1474) and NGS primers (SEQ ID NOs: 698-699) to target AAVS1 sites (SEQ ID NO: 654) with MG3-6n (SEQ ID NO: 653).

[0503] MG3-6 pegRNAs had four versions of modified scaffolds: modL1-4 (SEQ ID NOs: 1463-1470) with modL1-modL3 (SEQ ID NOs: 1463-1465 and 1467-1469) increasing G-C content on the first, second, and third hairpin, respectively, and modL4 combining modifications of all three hairpins (SEQ ID NOs: 1466 and 1470). MG3-6 wild type mRNA (SEQ ID NO: 1475) was used to determine percent modified (including SNPs and InDels) levels of target amplicon AAVS1 (SEQ ID NO: 654) in NGS amplicon. Guide RNA (SEQ ID NO: 116) reached percent modified levels of ˜75%. pegRNAs at PBS 10 (SEQ ID NO: 112) and PBS 13 (SEQ ID NO: 113) with the original MG3-6 scaffold reached about 31% and 35% modified, respectively (FIG. 64A). pegRNAs with modifications, modL1, modL3, and modL4 (SEQ ID NOs: 1463, 1465-1466, 1467, and 1469-1470) sharply dropped percent modified levels while modL2 (SEQ ID NOs: 1464 and 1468) slightly improved or remained constant with the pegRNAs containing the original scaffold design (SEQ ID NOs: 112-113) (FIG. 64A). This also translated to percent editing for a two nucleotide change in AAVS1 target (SEQ ID NO: 654) measured across PBS lengths 10 and 13 nucleotides with the original scaffold and modified scaffolds modL1-modL4 (SEQ ID NOs: 112-113 and 1463-1470) using tethered MMLV2 (SEQ ID NO: 1249) to C-terminus of MG3-6n (SEQ ID NO: 653) with percent editing levels improved for modified scaffold modL2 (SEQ ID NOs: 1464 and 1468) (FIG. 64B-64C). These results indicate the importance of the sequence of the first and third hairpin of the MG3-6 scaffold and suggests that future structural designs should avoid disrupting the first and third hairpin of the MG3-6 scaffold. The pegRNA was then modified to determine if mismatches in the PBS sequence of the pegRNA could improve editing levels. Similar to the results seen with MG71-2n (FIG. 63), MG3-6n and selected untethered RTs (MMLV1, MMLV2, MG151-98 (H178N, Δ166AA), and MG151-98 (K297P, Δ166AA)) showed a large decrease in editing levels when the pegRNA contained mismatches in the PBS sequence (SEQ ID NOs: 1471-1474) (FIGS. 64D and 64E).

[0504] A chimera of MG3-6, MG3-6/3-8 (SEQ ID NO: 1476), was used to discover if percent modified (including SNPs and InDels) levels of target amplicon AAVS1 (SEQ ID NO: 654) (FIG. 65A) and B2M (SEQ ID NOs: 655 and 700-701) (FIG. 65B) could be improved. MG3-6 wild type (SEQ ID NO: 1475) and MG3-6/3-8 mRNA (SEQ ID NO: 1476) was used to direct InDels at target with guide RNA and pegRNA with PBS lengths 2, 4, 6, 8, 10, 13, 16, and 20 nucleotides (SEQ ID NOs: 109-124). For both AAVS1 and B2M targets (SEQ ID NOs: 654-655), MG3-6/3-8 (SEQ ID NO: 1476) shows higher levels of modifications (including InDels) on targets compared to MG3-6 (SEQ ID NO: 1475) (FIG. 65). In general, both MG3-6 and MG3-6/3-8 have decreasing InDel percentage as PBS length gets longer, however, MG3-6/3-8 has higher InDel efficiency at specific targets and recognizes target more efficiently as PBS length increases.

Discovery of MG Nickase in Conjunction with Reverse Transcriptases

[0505] MG nuclease MG14-241 (SEQ ID NO: 1477) and MG nickase MG14-241(H596A) (MG14-241n) (SEQ ID NO: 1478) were tested to determine compatibility with selected RTs for prime editing. A similar procedure to the above transfection and preparation of NGS samples protocols was used with the exception of different pegRNAs (SEQ ID NOs: 1479-1492) and NGS primers (SEQ ID NOs: 1493-1504) to target multiple AAVS1 genomic sites (SEQ ID NOs: 1505-1510) with MG14-241 (SEQ ID NOs: 1477-1478).

[0506] Wild type MG14-241 mRNA or plasmid (SEQ ID NO: 1477) was used to determine percent modified (including SNPs and InDels) levels of various targets (G1, H1, B2, E2, F2, and G2) (SEQ ID NOs: 1505-1510). Varying levels of InDels were seen for each target with target E2 (region of AAVS1) (SEQ ID NO: 1508) resulting in the highest levels of InDels (reaching about 60%) (FIG. 66A). mRNA of MG14-241(SEQ ID NO: 1477) was used to determine percent modified (including SNPs and InDels) levels of target amplicon E2 AAVS1 (SEQ ID NO: 1508) with guide RNA (SEQ ID NO: 1482) and pegRNAs with PBS lengths 2, 4, 6, 8, 10, 13, 16, and 20 nucleotides (SEQ ID NOs: 1485-1492) (FIG. 66B). Similarly to other MG nucleases, as PBS length increased, percent modified decreased when using MG14-241 (SEQ ID NO: 1477). MG14-241n (SEQ ID NO: 1478) with selected untethered RTs (MMLV1, MMLV2, MG151-98 (H178N, Δ166AA), and MG151-98 (K297P, Δ166AA)) was used to determine percent editing of five nucleotide change on AAVS1 target (SEQ ID NO: 1509) across all eight different PBS lengths (SEQ ID NOs: 1485-1492) (FIGS. 66C-66D). Editing levels for a 5 nucleotide change was seen for all selected RTs at a specific PBS length with untethered RTs showing the highest level of editing at PBS 8 and 10 for all selected RTs. Editing levels remained low for all selected RTs, but further optimization of MG14-241n (SEQ ID NO: 1478) and pegRNA could improve editing efficiencies at selected targets.

### Example 22. Site-Specific Integrations of Large Cargo Templates by Non-LTR Retrotransposon RTs and GII Intron RTs

[0507] Group II introns and non-LTR retrotransposases are capable of integrating large cargo into a target site via reverse transcription of an RNA template. These reverse transcriptases (RTs) integrate an RNA template via target primed reverse transcription (TPRT), a mechanism in which cDNA synthesis is primed by the free 3′ hydroxyl group at the target DNA nick. These enzymes are predicted to be active based on the presence of expected RT catalytic residues [F/Y]XDD. To evaluate the ability of these RTs to work in conjunction with a nuclease/nickase to generate programmable, site-specific integrations of cargoes of interest as opposed to their endogenous cargoes, several RT-nuclease/nickase fusion constructs were designed. Additionally, various RNA templates were also designed and tested against all RT-Cas fusion constructs to identify a combination that would successfully generate targetable integrations of large cargo.

### Large, Site-Specific Genomic Integrations Templated by RNA in Mammalian Cells

[0508] The ability of RTs to reverse transcribe and integrate cDNA from an RNA cargo into a target site specified by a nuclease/nickase was tested by expressing fusion proteins of RTs with SpCas9 WT or SpCas9 Nickase in the presence of an RNA cargo. The target site for genomic integration was specified by the addition of a sgRNA.

[0509] To preclude loss of integration owing to the target site being essential for the viability of the cell line, an engineered landing pad with five spacers for SpCas9 was designed (SEQ ID NO: 1511, FIG. 67A). In addition to the spacers, this landing pad also encoded a blasticidin resistance cassette. A stable cell line was generated in HEK293 cells using a lentiviral vector encoding this engineered landing pad at a low MOI and transduced cells were selected with Blasticidin (8 pg/mL) from 3 days to 10 days post-transduction. A guide screen was conducted using SpCas9 WT mRNA in the engineered cell line to determine the percentage of indels generated by guides targeting each of the five spacers. 500 ng of WT SpCas9 mRNA was transfected into 50,000 engineered cells alongside 10 pmoles of each guide (SEQ ID NOs: 696, and 1512-1516) in a 24-well plate with lipofectamine messenger MAX using the manufacturer's recommendations. Three days post transfection, cells were lysed in 100 μL DNA extraction solution and a PCR (SEQ ID NOs: 1518-1519) was set up to amplify the region flanking the spacers. The amplicon was sequenced and run through an in-house program to determine the percentage of indels generated. Guides 1 through 4 generated 79-88% indels, whereas guide 5 generated 30% indels (FIG. 67B). Owing to their high efficiency of generating indels, suggestive of high cutting ability, guides 1 through 4 were chosen for testing in the integration assay using RT-SpCas fusion proteins.

[0510] Reverse transcriptases were cloned at the N-terminus or C-terminus of SpCas WT or Cas Nickase under the CMV promoter, generating a total of 4 constructs for each RT (FIG. 67C, SEQ ID NOs: 1520-1531). A Flag-HA-SV40 NLS tag was added at the N-terminus and another SV40-NLS was added at the C-terminus of the fusion protein to ensure that it localizes to the nucleus upon expression. Additionally, an MS2 coat protein (MCP) tag was added to the RT to facilitate recognition of MS2 tagged RNA template cargoes. MCP is a protein derived from the MS2 bacteriophage that recognizes a 20 nucleotide RNA stem loop with sub-nanomolar affinity. By fusing the RTs with an MCP tag and having the MS2 loops in the RNA template, it is ensured that once the RT is translated it can find the RNA template and start synthesizing cDNA from it, using the DNA overhang generated by SpCas WT/Nickase as the primer. MG140-3 (SEQ ID NO: 163) and MG140-8 (SEQ ID NO: 168) were the non-LTR retrotransposon RTs that were tested. MG153-18 (SEQ ID NO: 463) is a GII intron RT that was tested.

[0511] Six different RNA templates were designed for testing each non-LTR retrotransposon RT for integration, (SEQ ID NOs: 1532-1540, FIG. 67D). Two of the templates contain MS2 loops for recognition by the MCP-tagged RT (cargo 1 and cargo 2), while three other template designs contain endogenous UTR elements of the RT that were tested to allow template recognition in the absence of MS2 loops (cargo 4-6). Cargo 1 has an antisense-mCherry open reading frame (ORF), driven by an EF1 alpha promoter, followed by a 10-nucleotide (nt) homology to the DNA overhang (10-nt homology) and 2 MS2 loops. Cargo 2 has an antisense-mCherry ORF, driven by an EF1 alpha promoter, followed by 2 MS2 loops and a 10-nucleotide (nt) homology to the DNA overhang (10-nt homology). Cargo 3 has antisense-mCherry ORF followed by the 10-nt homology without any MS2 loops. Cargo 4 has the antisense-mCherry ORF flanked by 5′ and 3′ UTR sequences of each non-LTR retrotransposon RT (MG140-3 and 140-8) followed by the 10-nt homology. Cargo 5 is essentially the same as cargo 4 but without the 3′ UTR. Similarly, Cargo 6 is cargo 4 without the 5′ UTR. All RNA templates were generated with a 5′ cap and a 3′ poly A tail. The DNA sequence corresponding to each template with an additional T7 promoter was PCR amplified by Flash phusion polymerase according to the manufacturer's instructions. The PCR reaction was cleaned up and 200-500 ng of cleaned PCR product was used per in vitro transcription reaction (IVT). The IVT reaction buffer contains 1×T7 buffer (40 mM Tris HCl, pH 7.5, 16.5 mM MgCl₂, 50 mM NaCl, 2.5 mM Spermidine and 1 mM DTT), 5 mM rATP, 5 mM rUTP, 5 mM rGTP, 4 mM CleanCap-AG, 0.1 unit IPPase (inorganic pyrophosphatase), 40 units RNase inhibitor and 750 units high concentration Hi-T7 RNA polymerase. The IVT reaction was incubated at 50° C. for 1 hr. This was followed by DNase I treatment with 10 units of DNaseI for 10 minutes at 37° C. The reactions were then cleaned up and the purity of RNA templates their quantities were determined.

[0512] Integration assays were set up in a 6-well format with 1 million engineered cells plated per 6-well in 2 mL media. Each well was transfected with 2500 ng plasmid encoding the RT-SpCas fusion protein, 10 pmoles of chemically synthesized sgRNA, and 2400 ng of cargo pool containing 400 ng of each of 6 RNA cargoes (for non-LTR retrotransposon RTs) or 800 ng of each of 3 RNA cargoes (cargo 1, cargo 2, and cargo 3 for GII intron RTs). Lipofectamine 2000 was used to transfect the plasmid component and Lipofectamine Messenger MAX was used to transfect the RNA component according to the manufacturer's instructions. 24 hours later, cells were split into puromycin containing media (2 pg/mL) to select for cells transfected with the RT-SpCas plasmid, which contains a puromycin resistance cassette. Cells were switched to media without puromycin 3 days post-transfection and split every 2-3 days until 10 days post-transfection. Cells were collected at 4-10 days post transfection and lysed in 100 pL DNA extraction solution. Integration was detected by nested PCR (FIG. 68) at the left end junction (LE) using a forward primer on the landing pad, upstream of the target site, and two reverse primers on the EF1 alpha promoter (SEQ ID NOs: 1541-1543). Likewise, nested PCRs were performed to detect integration at the right end junction (RE) using two forward primers on the EF1 alpha promoter and two reverse primers on the landing pad downstream of the target site (SEQ ID NOs: 1544-1547). LE PCR products were run and LE and RE PCR products were sequenced by Sanger. Sequencing reads were analyzed to determine successful integration of cargo at the target site.

[0513] Integration of cargo was detected at the engineered landing pad for MG140-3, MG140-8, and MG153-18 when fused with SpCas WT. Fusion constructs with SpCas Nickases did not yield any detectable integrations. Three of four tested guides (sg1, sg3, and sg4) yielded integrations. Representative data with sg4 is shown.

[0514] FIG. 69 shows tapestation and sanger sequencing results for the transfection of SpCas WT (N-ter) fused to MG140-3 (C-ter) with sg4 and 6 pooled RNA cargoes at 7 days post-transfection. Tapestation data for LE junction showed a band lower than −400 bp in the guided sample that was absent in the untransfected cells and non-targeting cells (FIG. 69A). This was corroborated by sequencing data that showed LE junction reads going from the landing pad to cargo 2 starting from the MS2 loop closest to the EF1 alpha promoter, with reads going into 96 bp of EF1 alpha promoter, where the reverse primer was located, for a total of 135 bp of detected integration (FIG. 69B). RE junction PCRs were designed so that the FP would be on the part of the EF1 alpha promoter detected in the LE junction and the RP would be on the landing pad. RE PCR junction reads showed 130 bp of cargo sequence going from the EF1 alpha promoter into 74 bp of mCherry sequence, with the last 8 bp being discontinuous, followed by 198 bp of SpCas sequence (FIG. 69C), suggestive of template jumping, before mapping back to the landing pad. Based on the presence of MS2 loops close to the EF1 alpha promoter at the LE junction, it was concluded that of all 6 cargoes, cargo 2 is the one that got integrated.

[0515] FIG. 70 shows results for the transfection of MG140-3 (N-ter) fused to SpCas WT (C-ter) with sg4 and 6 pooled RNA cargoes at 7 days post-transfection. Data for LE junction showed a band lower than −400 bp in the guided sample that was absent in the untransfected cells and non-targeting cells. This was corroborated by sequencing data that showed LE junction reads going from the landing pad to cargo 2 starting from the MS2 loop closest to the EF1 alpha promoter, with reads going into 96 bp of EF1 alpha promoter, where the reverse primer was located, for a total of 135 bp of detected integration as seen with transfection of SpCas WT (N-ter) fused to MG140-3 (C-ter) with sg4 in FIG. 69. Based on the presence of MS2 loops close to the EF1 alpha promoter at the LE junction, it was concluded that of all 6 cargoes, cargo 2 is the one that got integrated.

[0516] FIG. 71 shows sanger sequencing results for the transfection of SpCas WT (N-ter) fused with MG140-8 (C-ter) with sg4 and 2400 ng of Cargo 1 sequence at 4 days post-transfection. Sequencing data for LE junction shows 73 bp of cargo sequence including the MS2 loop closest to the EF1 alpha promoter and 8 nt of the 10 nt homology. Following this a 368 bp insertion mapping to 18S rRNA was detected. As in FIG. 69, the RT appears to have jumped templates, switching from the cargo template to other abundant RNAs in its vicinity such as the SpCas sequence encoded by the RT-SpCas fusion or ribosomal rRNAs that are known to be highly expressed in cells.

[0517] FIG. 72 shows results for the transfection of MG153-18 (N-ter) fused to SpCas WT (C-ter) with sg4 and 3 pooled RNA cargoes (cargo 1, cargo 2, and cargo 3) at 6 days post-transfection. Data for LE junction (FIG. 72A) showed a band lower than −400 bp in the guided sample that was absent in the untransfected cells and non-targeting cells. This was corroborated by sequencing data that showed LE junction reads (FIG. 72B) going from the landing pad to cargo 3 starting from the very end of the template including the RP used for in vitro transcription, the poly A tail, 10 nt-homology and 96 bp of EF1 alpha promoter sequence for a total insertion of 163 bp of cargo sequence. Based on the absence of MS2 loops at the LE junction, it was concluded that of all 3 cargoes, cargo 3 is the one that got integrated.

[0518] Altogether, these results demonstrate that MG140-3, MG140-8, and MG153-18 are capable of integrating cargo at a specified target site in conjunction with Cas nucleases.

### Example 23. Highly Processive Retron RTs on Cognate ncRNAs with 2.2 kb Cargo In Vitro

[0519] To evaluate the processivity and specificity of retron RTs on long RNA templates (2.2 kb), two substrates were designed and tested for each RT (FIG. 73A). The generic template (SEQ ID NO: 1548) was used to evaluate the extent of non-specific RT activity and was generated by annealing a ssDNA priming oligo to the 3′ end of the RNA template. For this substrate, cDNA synthesis was initiated by the free 3′ hydroxyl group of the priming oligo. The retron ncRNA was primed with the 5′ and 3′ inverted repeats (IRs) facilitated by the presence of terminal 5′ and 3′ retron ncRNA elements specific to each retron system. For this substrate (SEQ ID NOs: 1549-1555), cDNA synthesis was initiated by a 2′ hydroxyl located within the ncRNA msr. For both substrates, the 2.2 kb template consisted of a cargo sequence flanked by the reverse complement of the LE and RE recognition motifs for the ssDNA transposase MG92-4 TnpA. When the RNA sequence is reverse transcribed by the retron RT, the LE and RE motifs will be present flanking the cargo and in the correct orientation for recognition by TnpA. External to the region encoding the LE/RE TnpA motifs, the sequence contains an additional ˜100 nt buffer sequence on each end that, when converted to ssDNA, can be quantified by TaqMan qPCR. Primers and probes designed to detect the beginning 5′ end of the ssDNA (FAM) and 3′ end of the ssDNA (HEX) were used to assess how well the RT can initiate and complete synthesis of the 2.2 kb template. For each retron ncRNA, the 2.2 kb sequence was inserted into a region of the ncRNA msd determined previously to be replaceable.

[0520] Each retron RT was co-expressed with either the annealed generic template or refolded cognate ncRNA loaded with cargo in a cell-free expression system supplemented with dNTPs (NEB, 0.3 mM final). In the co-expression reaction, RNA templates were used at a final concentration of 75 nM. After incubation for 2 h at 37° C., the reaction was quenched via the addition of RNase A. Samples were then diluted prior to TaqMan qPCR to ensure ssDNA concentrations were within the linear range of detection. The amount of beginning and end of the 2.2 kb ssDNA was quantified by extrapolating values from a standard curve generated with a DNA template of known concentrations.

[0521] As expected (FIG. 73B), TGIRT (Control GII intron) is highly processive on the 2.2 kb generic template, indicated by FAM and HEX detected in near equimolar ratio. In contrast, for MMLV (Control retroviral RT), which is expected to be highly active but not processive, the FAM signal was notably higher than HEX. Interestingly, the positive control retron RT Ec86 does have appreciable non-specific activity on the generic template but is not processive. MG154-1 (SEQ ID NO: 1549) does not have appreciable non-specific activity and using its own cognate ncRNA did not dramatically improve its activity nor processivity. MG157-3 does not have detectable activity on the generic template, but is active and processive on their cognate ncRNAs (SEQ ID NO: 1550). MG157-1 similarly does not have detectable activity on the generic template, does have activity on its cognate ncRNA (SEQ ID NO: 1551), but is not processive. MG157-4 is active but not processive on the generic template but is more active and more processive on its cognate ncRNA (SEQ ID NO: 1552). MG158-1, MG159-3, and MG173-1 are active and processive on both the generic template and on their cognate ncRNAs (SEQ ID NOs: 1553-1555).

[0522] To further confirm that a full-length 2.2 kb ssDNA molecule was synthesized by the retron RT from its cognate ncRNA, co-expression reactions were diluted 1:50 and amplified with the most external TaqMan qPCR primers, specifically the forward primer for the HEX probe and the reverse primer for the FAM probe. Products were evaluated by Tapestation D5000 (Agilent). Product presence was not confirmed for MG157-3, likely due to low ssDNA quantities produced by the retron RT (FIG. 73C). However, a 2.2 kb product was confirmed for MG157-4, MG158-1, MG159-3, and MG173-1. Of note, in addition to the 2.2 kb product, other smaller products also appear to be generated by MG159-3. Altogether, these results demonstrate that MG157-4 is a highly active, processive, and specific retron RT, while MG157-3 are processive and specific retron RTs, but less active in vitro than MG157-4.

### Example 24. Highly Processive Retron RTs on Cognate ncRNAs with 2.2 kb Cargo in Mammalian Cells

[0523] The ability of retron RTs to produce cDNA in a mammalian environment was tested by expressing them in mammalian cells and detecting cDNA synthesis by qPCR. To evaluate the processivity and specificity of retron RTs on long RNA templates (2.2-4 kb), three substrates were tested for each RT. Generic 4 kb and 2 kb templates (SEQ ID NOs: 648 and 1548) were used to evaluate the extent of non-specific RT activity and were generated by annealing a ssDNA priming oligo to the 3′ end of the RNA template. The MG173-1 retron ncRNA was primed with the 5′ and 3′ inverted repeats (IRs) facilitated by the presence of terminal 5′ and 3′ retron ncRNA elements specific to MG173-1 (SEQ ID NO: 1555). For this substrate, cDNA synthesis was initiated by a 2′ hydroxyl located within the ncRNA msr.

[0524] To prepare the cDNA template, the DNA sequence corresponding to each RNA template was prepared with a T7 promoter appended to the sequence and then PCR amplified. The PCR reaction was cleaned up and 200-500 ng of cleaned PCR product was used per in vitro transcription reaction (IVT). The IVT reaction and RNA purification was performed as described above. The purity of RNA templates and their quantities were determined. Generic 4 kb and 2 kb templates were hybridized to a complementary DNA primer (SEQ ID NO: 1557) in 10 mM Tris pH 7.5, 50 mM NaCl at 95° C. for 2 min and cooled to 4° C. at the rate of 0.1° C./s. MG173-1 specific ncRNA was taken through the hybridization reaction with water in place of the complementary DNA primer.

[0525] A plasmid containing MG173-1 under the CMV promoter was cloned and isolated for transfection in HEK293T cells. Plasmid transfection was performed using lipofectamine 2000 using the manufacturer's instructions. The generic RNA/DNA hybrid or mock hybridized ncRNA was transfected into HEK293T cells 6 hours after the plasmid containing the RT was transfected. 18 hours post RNA/DNA transfection, cells were lysed. 100 μL of quick extract was added per well in a 24 well plate. Primers to amplify first and last 100 bp products from the newly synthesized cDNA were designed (SEQ ID NOs: 1557-1560), along with probes (SEQ ID NOs: 1561-1562) to quantify their amplification (FIG. 74A).

[0526] Activity of MG173-1 was detected on all 3 RNA templates, as evidenced by higher FAM and HEX signals for each of the templates in presence of MG173-1 as opposed to the No RT condition (FIG. 74B). However, the FAM signal for MG173-1 on the ncRNA was about 200 times greater than its FAM signal in the No RT condition, whereas with both generic templates it is only about 64 times greater than in the No RT condition. In terms of processivity, MG173-1 is most processive on its ncRNA followed by the 2 kb generic template, and it is not processive on the 4 kb generic template. Altogether, MG173-1 is most active and processive on its cognate ncRNA as opposed to the two tested generic templates in mammalian cells. The high activity, specificity, and processivity in vitro and in mammalian cells of the retrons discovered and characterized herein demonstrate the feasibility of their use as genome editing tools.

### Example 25. TnpA Integration of ssDNA Produced by a Retron RT In Vitro

[0527] For in vitro transposition activity using a retron-produced ssDNA, TnpA candidate MG92-4 was first expressed in an in vitro transcription-translation (IVTT) kit following manufacturer's recommended conditions at 37° C. for 2 hours with a template concentration of 65.7 ng/μL. Transposition assays were set up with 1 μL of IVTT expressing MG92-4 protein, 1 μL of a retron-produced ssDNA cargo, and 50 nM of a ssDNA ultramer “target” in reaction buffer (20 mM HEPES (pH 7.5), 160 mM NaCl, 5 mM MgCl₂, 5 mM TCEP, 20 μg/mL BSA, 0.5 μg/mL of poly-dIdC, and 20% glycerol) per 10 μL reaction. The ssDNA cargo was obtained from an IVTT reaction of the retron and ncRNA that was RNAseA treated as described in Example 23. Control reactions contained a no-template control (NTC) reaction of IVTT where Tris buffer was added instead of PCR template to the IVTT. Reactions were incubated at 37° C. for 1 hour to allow transposition to occur, then the reaction was diluted 10-fold in water and transposition was detected via PCR. The LE junction was detected via a forward primer on the 5′ end of the target and reverse primer within the EF1a promoter of the retron-produced cargo. PCR products were run on an agarose gel to detect transposition (FIG. 75A), and sequenced via Sanger. Chimeric reads that contained both target and cargo sequence were analyzed to determine the junction of transposition at the known insertion motif of TnpA 92-4 (FIG. 75B). Taken together, these data indicate that single strand transposases can recognize ssDNA produced by a retron, making this process a suitable path for genome editing.

### Example 26. Identifying and Optimizing a Complete MG System (Nickase and RT) for Prime Editing on Therapeutically Relevant Targets

### Testing MG71-2 Nuclease Activity and Prime Editing on Therapeutically Relevant Targets

[0528] MG71-2 wildtype mRNA (SEQ ID NO: 1563) was transfected alongside chemically synthesized guide RNAs (SEQ ID NOs: 1564-1576) targeting therapeutically relevant sites (SEQ ID NOs: 1577-1591). 500 ng of mRNA and 120 pmoles of gRNAs were transfected into 50,000 cells. For prime editing experiments, selected RT candidates in the tethered system were cloned into a plasmid containing the nickase MG71-2(H883A)(MG71-2n) to generate an RT-nickase fusion (SEQ ID NOs: 1592-1597). The CMV promoter drove the expression of the fusion protein, which contained a 33 amino acid linker (SEQ ID NO: 103) between the nickase and the RT candidate. Plasmid was transfected. All components (plasmids and therapeutically relevant pegRNAs (SEQ ID NOs: 1598-1609)) were reverse transfected into 50,000 HEK293T cells in a 24 well plate. 72 hour post transfection, cells were lysed in 100 μL of DNA extraction solution. Primers containing barcodes for next generation sequencing (NGS) were used to amplify a ˜250 bp target for each therapeutically relevant site. PCR cleanup was then performed and samples were sequenced. The percentage of reads with desired change was determined.

[0529] Nuclease activity of MG71-2 was tested on various guide RNAs targeting therapeutically relevant sites hPDK1, G6PC1, PAH, and HBB (FIG. 76). MG71-2 showed about 30% InDels at hPDK1 and about 25% InDels on PAH gene targeting R408W with guide 2 (FIG. 76A). Little to no nuclease activity was seen at G6PC1 targeting Q347* for two different guide RNAs. When targeting the PAH R408W therapeutically relevant site, guide 2 had about a ˜4 fold increase in InDel levels compared to guide 1. When targeting HBB E7V mutation, nuclease activity of MG71-2 had InDel levels reaching about 75% (FIG. 76B). Further, nuclease activity was tested for pegRNAs containing PBS lengths of 8, 10, and 13 nucleotides. PBS length did not have a significant decrease in InDel levels when compared to the guide RNA (FIG. 76B). When performing prime editing experiments targeting the microRNA recognition site in hPDK1, RT templates included either a 3nt or 5nt change to disrupt the micRNA recognition site. Above background levels of editing were seen for prime editing constructs MG160-4(H230R)-MG71-2n and MMLV2-MG71-2n for pegRNAs with a PBS length of 10 nt and an RTT containing a 3nt change (FIGS. 76C and 76D). Prime editing was slightly lower with pegRNAs having an RTT containing a 5 nt change. When targeting PAH R408W with MG160-4(H230R)-MG71-2n or MMLV2-MG71-2n with various pegRNAs having PBS length 8, 10, 13nt and an RTT length of 29 or 32nt, no prime editing was detected (FIGS. 76E and 76F). Moving towards targeting the HBB gene, both MG160-4(H230R)-MG71-2n and MMLV2-MG71-2n had above background levels of editing (FIGS. 76G and 76H). For all therapeutically relevant sites recognized by MG71-2, prime editing levels can be improved by optimization of pegRNAs through adjusting RTT sequence, RTT length, and PBS length, along with improving transfection efficiency and discovering compatible nicking guides.

### MG71-2n and Selected RTs for Larger Genomic Insertions

[0530] To determine insertion location of Bxb1 AttB on the AAVS1 gene, guides (SEQ ID NOs: 1610-1653) were designed to test for InDels at specific sites in the gene using wild type mRNA of MG71-2 (FIG. 77A). Two specific sites 69nt apart (guide D3 and guide D4) were used to design pegRNAs compatible for the PE2, PE3, twin-PE, and TJ-PE systems (SEQ ID NOs: 1656-1681). Correct ratios of chemically synthesized pegRNA and nicking guide RNA were transfected as described above using selected nickase-RT fusion constructs in plasmid. PCR reaction was performed with a forward primer specific to the Bxb1 38nt AttB sequence and a reverse primer downstream of the insertion site (SEQ ID NO: 1682). Amplification using these primers indicate the insertion of the AttB sequence that can be visualized on either an agarose gel electrophoresis or tape station.

[0531] MG151-98(H171N, K297P, Δ166AA)-MG71-2n (SEQ ID NOs: 1447 and 1654) was tested for the ability to incorporate a 38nt Bxb1 AttB sequence at a specific AAVS1 locus using various methods. The Bxb1 junction PCR for MG151-98(H171N, K297P, Δ166AA)-MG71-2n and MMLV2-MG71-2n was run on a tape station and showed a band indicating insertion of the Bxb1 sequence (FIG. 77B). The size difference between the two amplicons (the wild type amplicon and the Bxb1 incorporated amplicon) was analyzed on a tape station to show the relative abundance of the two amplicons (FIGS. 77C and 77D).

### Optimization of MG71-2n Prime Editing Systems Through Inlaid and Linker Designs

[0532] Optimization of prime editing systems with MG71-2n and selected RT, MG160-4(H230R), were rationally designed to generate five different inlaid constructs (SEQ ID NOs: 1691-1695). MG160-4(H230R) was inserted at position S311, S355, T396, 1822, and V1176 in MG71-2n. MG160-4(H230R) had a 5′ and 3′ 33 amino acid linker at the point of insertion. The inlaid fusion constructs coding region were cloned into an expression vector driven by the CMV promoter. Tethered constructs with MG160-4(H230R) on the N and C terminus of MG71-2n were also tested alongside the inlaid constructs (SEQ ID NO: 1696). Tethered constructs of MG160-4 wildtype (SEQ ID NOs: 1697-1698) on the N-term of MG71-2n were tested with the 33AA linker along with a 14AA, 15AA, 26AA, and 32AA linker (SEQ ID NOs: 1699-1702). MG160-473 and MG151-98(H171N, Δ166AA) were tested across linker lengths ranging from 7AA to 58AA (SEQ ID NOs: 1703-1720). Systems were transfected as described above with chemically synthesized pegRNAs encoding the intended edit. Inlaid designs of MG160-4(H230R) with MG71-2n were tested for prime editing of a 5nt change and a 24nt insertion with PBS lengths of 8, 10, 13, and 16nt targeting the AAVS1 locus. Out of the five inlaid designs, V1176 resulted in the poorest activity for both a 5nt change and 24nt insertion. For the other four inlaid sites, S311, S355, T396, and 1822, similar editing levels amongst the constructs was seen and the highest level of editing was reached with pegRNA having a PBS length of 13nt for a 5nt change (FIGS. 78A-78D). However, even with some activity seen for four out of the five inlaid constructs, the highest levels of editing was achieved with MG160-4(H230R) on the N-terminus of MG71-2n for both a 5nt change and a 24nt insertion. Having MG160-4(H230R) on the C-terminus of MG71-2n resulted in little to no detectable editing. These results are potentially due to the structural limitations of MG71-2n and the protein-protein interactions between MG71-2n and MG160-4(H230R). With clear preference for having the RT on the N-terminus of MG71-2n, selected RTs (MG160-4, MG160-473, and MG151-98(H171N, Δ166AA)) were tested with the original 33AA linker along with varying linker lengths and amino acid composition (FIGS. 78E-78L). Five linker lengths (14AA, 15AA, 26AA, 32AA, and the original 33AA) were tested with MG160-4 tethered to the N-terminus of MG71-2n and challenged to a 5nt change and 24nt insertion on the AAVS1 target. The 15AA, 32AA, and 33AA linker performed similarly when correcting a 5nt change with potentially the highest level of editing seen for the 32AA linker (FIGS. 78E and 78G). When these tethered constructs were incorporating a 24nt insertion, linker length seemed to have less of an effect on the editing levels (FIGS. 78F and 78H). Editing levels for a 5nt change and 24nt insertion were much lower for RTs MG160-473 and MG151-98(H171N, Δ166AA) compared to MG160-4 (FIGS. 78I-78L). When targeting a 5nt change, a pegRNA of PBS 13nt was used and depending on the RT, linker lengths resulted in different levels of prime editing. For MG160-473, the highest levels of editing for a 5nt change were seen with a 44AA linker and with MG151-98(H171N, Δ166AA) the highest levels of editing seen for a 5nt change was with a 14AA linker.

### Testing MG3-6-3-8 Nuclease Activity and MG3-6-3-8n and MG3-6n Prime Editing on Therapeutically Relevant Targets

[0533] MG3-6-3-8 wildtype mRNA (SEQ ID NO: 1476) was transfected alongside chemically synthesized guide RNAs targeting therapeutically relevant sites (SEQ ID NOs: 1722-1752). RNA was transfected as described above. For prime editing experiments, selected RT candidates in the tethered system were cloned into a plasmid containing the nickase MG3-6-3-8(H586A)(MG3-6-3-8n) (SEQ ID NOs: 1753-1754) or MG3-6(H586A)(MG3-6n) (SEQ ID NOs: 653, and 1776-1778) to generate an RT-nickase fusion. The CMV promoter drove the expression of the fusion protein, which contained a 33 amino acid linker between the nickase and the RT candidate. pegRNAs (SEQ ID NOs: 1755-1774) along with nickase-RT constructs were transfected and samples were analyzed as described above. MG3-6-3-8 targeted five different therapeutically relevant sites with each therapeutically relevant site having various guide RNAs (gRNA) to determine which gRNA resulted in the highest levels of InDels at the target site (FIG. 79A). The guide resulting in the highest levels of InDels is shown in dark gray (A1AT: guide 2 (G2), PAH R408W guide 8 (G8), G6PC1 Q347* guide 4 (G4), G6PC1 R83C guide 2 (G2), and hPDK1 guide 2 (G2)); this spacer sequence was used for designing pegRNAs (FIG. 79A). Prime editing experiments were performed on each therapeutic target using MG3-6-3-8n constructs with RT (MG160-4(H230R) or MMLV2) tethered to the C-terminus of the nickase (FIGS. 79B-79K). Low to no detectable editing was seen for all targets using MG3-6-3-8n-MG160-4(H230R) (FIGS. 79B-79K). With construct MG3-6-3-8n-MMLV2, no detectable editing was seen for targets PAH R408W (FIGS. 79F and 79K), G6PC1: R83C (FIGS. 79E and 79J) and hPDK1 (FIGS. 79C and 79H). With MG3-6-3-8n-MMLV2, editing levels were slightly above background at target A1AT (FIGS. 79B and 79G), and G6PC1: Q347* (FIGS. 79D and 79I). Since editing levels were below background for MG160-4(H230R) tethered to the C-terminus of MG3-6-3-8n, constructs of MG160-4(H230R) tethered to the N-terminus of MG3-6-3-8n (MG160-4(H230R)-MG3-6-3-8n) or MG3-6n (MG3-6n-MG160-4(H230R) were generated and compared to MG3-6n-MMLV2 and MG3-6-3-8n-MMLV2 (MMLV2 on the C-terminus of MG3-6n or MG3-6-3-8n) targeting A1AT and hPDK1 (FIGS. 79L-79O).

### Optimization of MG3-6n Prime Editing Systems Through Linker and Inlaid Designs

[0534] Tethered constructs of MG160-4 wildtype on the N-term of MG3-6n were tested with the 33AA linker along with a 32AA, 44AA, and 58AA linker (SEQ ID NOs: 1780-1783). Optimization of prime editing systems with MG3-6n and selected RT, MG160-4(H230R), was rationally designed to generate five different inlaid constructs. MG160-4(H230R) was inserted at position K115, V208, K368, D550, and L881 in MG3-6n (SEQ ID NOs: 1790-1795). MG160-4(H230R) had a 5′ and 3′ 33 amino acid linker at the point of insertion. The inlaid fusion constructs coding region were cloned into an expression vector driven by the CMV promoter. Tethered constructs with MG160-4(H230R) on the N and C terminus of MG3-6n were also tested alongside the inlaid constructs. A stable cell line, in HEK293 cells, was generated using a lentiviral vector encoding hygromycin (hygro) and blue fluorescent protein (BFP) with a linker in between hygromycin and BFP containing two stop codons (SEQ ID NOs: 1784-1789). Stable cell line (Hygro-STOP-BFP) was generated at a low MOI and transduced cells were selected with hygromycin (120 pg/mL) from 7 days to 10 days post-transduction. Systems were transfected as described above with chemically synthesized pegRNAs encoding the intended edit fixing the two stop codons in the linker between hygromycin and BFP.

[0535] Wild type MG160-4 tethered to the N-terminus of MG3-6n with four different linker compositions targeted an engineered site using pegRNAs with PBS lengths of 8, 10, and 13 nucleotides and an RTT encoding the correction of two stop codons (FIGS. 80A and 80B). At PBS 8 nt, a clear trend showed that as linker length increased, prime editing levels improved (FIGS. 80A and 80B). However, at PBS length of 10 and 13 nt, editing levels did not have a clear trend between linkers. When testing the inlaid designs of MG3-6n and MG160-4(H230R), editing levels dropped to below background when targeting the engineered cell line (FIGS. 80C and 80D). The best fusion construct was MG160-4(H230R) on the N-terminus of MG3-6n and showed the highest level of editing with pegRNA PBS 8nt giving approximately 0.6% editing.

### Example 27. Short Corrections, Small Insertions and Deletions with Natural and Engineered RTs

### Testing Natural Reverse Transcriptase Candidates Tethered to MG71-2(H883A) Nickase

[0536] Reverse transcriptase candidates from the MG198 family (SEQ ID NOs: 1796-1823) and MG160 family (SEQ ID NOs:1405, 1407, 1414, and 1423) were tethered to the N-terminus of MG71-2n and challenged to a five nucleotide change on an AAVS1 target site (FIG. 81). A similar procedure to the above transfection and preparation of NGS samples was used.

[0537] Twenty eight candidates from the MG198 family were tested tethered to the N-terminus of MG71-2n. These tethered systems were challenged to a 5nt change and tested across PBS lengths of 8, 10, 13, and 16 nucleotides (FIG. 81A). MG198 candidates MG198-6 had editing levels above background with the best condition reaching approximately 0.6% editing at PBS 8nt. Slightly above background editing was also seen for MG198-7 with the highest level reaching almost 0.15%. All remaining MG198 candidates had no detectable editing for a 5nt change on AAVS1 target.

[0538] Four MG160 candidates, MG160-45, MG160-121, MG160-136, and MG160-232, were tested tethered to the N-terminus of MG71-2n and challenged to a five nucleotide change on AAVS1 target (FIG. 81B). Editing levels above background were seen for three out of the four candidates (MG160-232 showed no activity), with MG160-121-MG71-2n showing the highest levels of editing at PBS 10 nt reaching almost 1% editing. These candidates were directly compared to MG160-4(H230R)-MG71-2n and MMLV2-MG71-2n; selected MG160 candidates showed significantly less activity than MG160-4(H230R)-MG71-2n and MMLV2-MG71-2n.

### Testing Engineered Reverse Transcriptase Candidates Tethered to MG71-2(H883A) Nickase

[0539] Ancestral candidates were designed using selected MG160 candidates from the MG160 family. Thirteen MG160 ASRs (SEQ ID NOs: 1828-1846) were tethered to MG71-2n and tested for a 5nt change on the AAVS1 target. Selected MG160 ASRs were then tested for transversion, insertion, and deletion (peg RNA sequences SEQ ID NOs: 1848-1855) on the AAVS1 target using the same transfection protocol and NGS preparation and data analysis described above.

[0540] Out of the thirteen MG160 ASR candidates tested, four of the candidates (MG160-499, MG160-500, MG160-501, and MG160-502) were slightly active and three ASR candidates (MG160-491, MG160-492, and MG160-493) showed editing levels about 0.5% for a 5nt change on AAVS1 (FIG. 82A). MG160-491, MG160-492, and MG160-493 tethered to MG71-2n were then tested again for prime editing of a 5nt change on AAVS1 using pegRNAs with PBS 8, 10, 13, and 16nt (FIGS. 82B and 82C). These MG160 candidates were directly compared to MG160-4 wildtype, MG160-4(H230R), MMLV2, and EC86 (SEQ ID NO: 1847) all tethered to the N-terminus of MG71-2n. Wildtype MG160 ASRs were comparable to MG160-4(H230R) and MMLV2. In general, the highest levels of editing for a 5nt change were seen using a pegRNA of PBS 10nt or PBS 13nt and a drop off of editing was seen with a pegRNA of PBS 16nt (FIGS. 82B and 82C). This trend also holds true for MG160-4(H230R) and MMLV2. MG160-491, MG160-492, and MG160-493 were then challenged to perform a G-to-T transversion, a 24nt insertion, and a 15nt deletion (FIGS. 82D-82I). For a G-to-T transversion, MG160-491 and MG160-492 showed editing levels reaching about 1% editing, whereas MG160-493 did not reach more than 0.5% editing (FIGS. 82D and 82G). Editing levels for transversion were also comparable to MG160-4(H230R) and outperformed MMLV2 (FIGS. 82D and 82G). For a 24nt insertion, MG160-492 showed the highest levels of editing compared to all other candidates tested giving slightly over 1% editing with a pegRNA at PBS 8nt. Further, MG160-491 and MG160-492 showed comparable levels of editing as MG160-4(H230R) for a 15nt deletion reaching approximately 2% editing (FIGS. 82F and 82I). These MG160 ASR candidates did not perform better than MMLV2 for deletion but did show editing levels comparable to MMLV2 with transversion and insertion.

### Example 28. Short Corrections with the Addition of Nicking Guides to Improve Editing Efficiencies

[0541] Addition of guide targeting the opposite strand (also referred to as a nicking guide) has been employed in the PE3 prime editing system to improve the editing efficiency of pegRNAs (Anzalone et al. 2019). To test if this is an effective strategy, chemically-synthesized guides targeting the 125nt regions upstream and downstream of an AAVS1 site were designed (SEQ ID NOs: 1863-1910). These guides were evaluated across two different edits (a 5nt change (SEQ ID NO: 1685) and a single nucleotide G to T conversion (SEQ ID NOs: 1848-1851), two immortalized human cell lines (K562 and HEK293T) and three prime editing designs (MG160-4 H230R-MG71-2n, MMLV2-MG71-2n or MG151-98-DM-SL1-MG71-2n (SEQ ID NOs: 1592-1593 and 1654). Unless indicated otherwise, 5×10⁴ cells were nucleofected with IVT mRNA and either 150 pmol pegRNA alone (no nicking guide) or a combination of 150 pmol pegRNA and 50 pmol nicking guide. Cells were nucleofected using cell-type specific programs and recovered for three days at 37° C. gDNA was extracted, target regions were amplified, processed for NGS, and prime editing was analyzed.

[0542] The effect of 48 nicking guides (SEQ ID NOs: 1863-1910) on prime editing efficiency with AAVS1 C3 5nt pegRNA (SEQ ID NO: 1685) in K562 cells are shown in FIG. 83. Of the 48 guides tested, guide E6 showed the highest consistent increase in editing efficiency with both MG160-4 H230R-MG71-2n (SEQ ID NO: 1592) and MMLV2-MG71-2n (SEQ ID NO: 1593). A subset of these nicking guides (SEQ ID NOs: 1871-1877 and 1903-1910) were validated with MG160-4 H230R-MG71-2n, MMLV2-MG71-2n, and MG151-98-DM-SL1-MG71-2n (SEQ ID NO: 1654). FIGS. 84A and 84B showed a similar pattern as what was observed in FIG. 83. To validate that this effect is not cell type specific, a subset of nicking guides (SEQ ID NOs: 1871-1877 and 1903-1910) were tested in HEK293T cells. FIGS. 84C and 84D shows that again guide E6 showed the highest improvement in prime editing efficiency across all constructs tested. To validate that nicking guides can be employed across multiple edits, a subset of the nicking guides (SEQ ID NOs: 1871-1877 and 1895-1910) were tested with a pegRNA encoding a G to T single nucleotide change with PBS lengths 8, 10, 13, and 16 (SEQ ID NOs: 1848-1851) FIG. 85. Guide E6 had the highest impact on editing activity. Lastly, to maximize editing activity, different ratios of pegRNA to nicking guide were tested with the best AAVS1 C3 5nt correction pegRNA and the E6 nicking guide FIG. 86. A 2:1 ratio of pegRNA:nicking guide had a marginal increase in editing. Altogether, these experiments demonstrate the addition of nicking guides as a viable strategy to increase prime editing efficiency up to 6-fold.

### REFERENCES

[0543] Anzalone A V, Gao X D, Podracky C J, Nelson A T, Koblan L W, Raguram A, Levy J M, Mercer J A M, Liu D R. Programmable deletion, replacement, integration and inversion of large DNA sequences with twin prime editing. Nat Biotechnol. 2022, 40(5):731-740. doi: 10.1038/s41587-021-01133-w. Epub 2021 Dec. 9. PMID: 34887556; PMCID: PMC9117393.
[0544] Clement K, Rees H, Canver M C, Gehrke J M, Farouni R, Hsu J Y, Cole M A, Liu D R, Joung J K, Bauer D E, Pinello L. CRISPResso2 provides accurate and rapid genome editing sequence analysis. Nat Biotechnol. 2019, 37(3):224-226. doi: 10.1038/s41587-019-0032-3. PMID: 30809026; PMCID: PMC6533916.
[0545] González-Delgado A, Mestre M R, Martinez-Abarca F, Toro N. Prokaryotic reverse transcriptases: from retroelements to specialized defense systems. FEMS Microbiol Rev. 2021, 45(6):fuab025. doi: 10.1093/femsre/fuab025. PMID: 33983378; PMCID: PMC8632793.
[0546] He S, Corneloup A, Guynet C, Lavatine L, Caumont-Sarcos A, Siguier P, Marty B, Dyda F, Chandler M, Ton Hoang B. The IS200/IS605 Family and “Peel and Paste” Single-strand Transposition Mechanism. Microbiol Spectr. 2015 August; 3(4). Doi: 10.1128/microbiolspec.MDNA3-0039-2014. PMID: 26350330.
[0547] Shimamoto, T., Hsu, M. Y., Inouye, S. and Inouye, M. Reverse transcriptases from bacterial retrons require specific secondary structures at the 5′-end of the template for the cdna priming reaction. J Biol. Chem. 1993, 268, 2684-2692.
[0548] Zhao B, Chen S-A A, Lee J, Fraser H B (2022) Bacterial retrons enable precise gene editing in human cells. CRISPR Journal 2022, 5(1), DOI: 10.1089/crispr.2021.0065
[0549] Wang, Y., Guan, Z., Wang, C. et al. Cryo-EM structures of Escherichia coli Ec86 retron complexes reveal architecture and defence mechanism. Nat Microbiol 7, 1480-1489 (2022). https://doi.org/10.1038/s41564-022-01197-7.
[0550] Kong X, Wang Z, Zhang R, Wang X, Zhou Y, Shi L, Yang H. Precise genome editing without exogenous donor DNA via retron editing system in human cells. Protein Cell. 2021 November; 12(11):899-902. doi: 10.1007/s13238-021-00862-7. Epub 2021 Aug. 17. PMID: 34403072; PMCID: PMC8563936.
[0551] Yarnall M T N, Ioannidi E I, Schmitt-Ulms C, Krajeski R N, Lim J, Villiger L, Zhou W, Jiang K, Garushyants S K, Roberts N, Zhang L, Vakulskas C A, Walker J A 2nd, Kadina A P, Zepeda A E, Holden K, Ma H, Xie J, Gao G, Foquet L, Bial G, Donnelly S K, Miyata Y, Radiloff D R, Henderson J M, Ujita A, Abudayyeh O O, Gootenberg J S. Drag-and-drop genome insertion of large sequences without double-strand DNA cleavage using CRISPR-directed integrases. Nat. Biotechnol. 2023 April; 41(4):500-512. doi: 10.1038/s41587-022-01527-4. Epub 2022 Nov. 24. PMID: 36424489; PMCID: PMC10257351.
[0552] Zheng C, Liu B, Dong X, Gaston N, Sontheimer E J, Xue W. Template-jumping prime editing enables large insertion and exon rewriting in vivo. Nat. Commun. 2023 Jun. 8; 14(1):3369. doi: 10.1038/s41467-023-39137-6. PMID: 37291100; PMCID: PMC10250319.
[0553] Anzalone, A. V., Randolph, P. B., Davis, J. R. et al. Search-and-replace genome editing without double-strand breaks or donor DNA. Nature 2019 576:149-157. https://doi.org/10.1038/s41586-019-1711-4

### EQUIVALENTS

[0554] The disclosure may be embodied in other specific forms without departing from the spirit or essential characteristics thereof. The foregoing embodiments are therefore to be considered in all respects illustrative rather than limiting on the disclosure described herein. Scope of the disclosure is thus indicated by the appended claims rather than by the foregoing description, and all changes that come within the meaning and range of equivalency of the claims are intended to be embraced therein.

1. A fusion protein comprising a nickase linked to a reverse transcriptase using a linker, wherein the reverse transcriptase comprises at least about 80% sequence identity to any one of SEQ ID NOs: 161-629, 767-1220, 1959-2522, and 2582-2585.

2. A fusion protein comprising a nuclease linked to a reverse transcriptase using a linker, wherein the reverse transcriptase comprises at least about 80% sequence identity to any one of SEQ ID NOs: 161-629, 767-1220, 1959-2522, and 2582-2585.

3. A fusion protein comprising a catalytically dead nuclease linked to a reverse transcriptase using a linker, wherein the reverse transcriptase comprises at least about 80% sequence identity to any one of SEQ ID NOs: 161-629, 767-1220, 1959-2522, and 2582-2585.

4. A gene editing system, comprising:
a) a nickase;
b) a guide nucleic acid configured to form a complex with the nickase and to hybridize to a target nucleic acid sequence; and
c) a reverse transcriptase having at least about 80% sequence identity to any one of SEQ ID NOs: 161-629, 767-1220, 1959-2522, and 2582-2585 and configured to form a complex with the nickase.

5. The gene editing system of claim 4, wherein the nickase is a modified endonuclease.

6. The gene editing system of claim 5, wherein the modified endonuclease is a Type II CRISPR endonuclease.

7. The gene editing system of claim 5, wherein the modified endonuclease is a Type V CRISPR endonuclease.

8. The gene editing system of any one of claims 6-7, wherein the Type II CRISPR endonuclease or the Type V CRISPR endonuclease has nickase activity.

9. The gene editing system of claim 5, wherein the modified endonuclease is selected from the group consisting of: spCas9 (H840A), spCas9 (D10A), nMG3-6 (D13A), nMG3-6 (H586A), nMG3-6 (N609A), Cas12a, and MG29-1.

10. The gene editing system of claim 5, wherein the modified endonuclease comprises at least about 80% sequence identity to any one of SEQ ID NOs: 152-154.

11. The gene editing system of any one of claims 4-10, wherein the nickase and the reverse transcriptase are fused.

12. The gene editing system of any one of claims 4-10, wherein the nickase and the reverse transcriptase are linked by a linker.

13. The gene editing system of claim 12, wherein the linker comprises at least 10, 20, or 30 amino acids.

14. The gene editing system of claim 12, wherein the linker comprises about 30-35 amino acids.

15. The gene editing system of claim 12, wherein the linker comprises about 30 amino acids.

16. The gene editing system of claim 12, wherein the linker comprises at least 80% sequence identity to SEQ ID NO: 103.

17. The gene editing system of claim 12, wherein the linker comprises at least 80% sequence identity to any one of SEQ ID NOs: 155-160.

18. The gene editing system of any one of claims 4-10, wherein the nickase and the reverse transcriptase are not linked.

19. The gene editing system of any one of claims 4-18, wherein the guide nucleic acid comprises a spacer sequence and a crRNA.

20. The gene editing system of any one of claims 4-19, wherein the guide nucleic acid further comprises a reverse transcriptase template (RTT).

21. The gene editing system of claim 20, wherein a base in the RTT comprises a bulky modification selected from the group of complex sugars, or complex amino groups, and/or other modifications compatible with RNA.

22. The gene editing system of any one of claims 4-21, wherein the guide nucleic acid further comprises a primer binding site.

23. The gene editing system of claim 22, wherein the primer binding site is on a 3′ end of the guide nucleic acid.

24. The gene editing system of any one of claims 22-23, wherein the primer binding site comprises at least 2, 4, 6, 8, 10, 13, 16, 20, 24, 28, 32, 36, 40, 45, 50, 55, 60, or 65 nucleotides.

25. The gene editing system of any one of claims 4-24, wherein the nuclease is non-covalently linked to the guide nucleic acid.

26. The gene editing system of any one of claims 4-24, wherein the nuclease is covalently linked to the guide nucleic acid.

27. The gene editing system of any one of claims 4-24, wherein the nuclease is fused to the guide nucleic acid.

28. The gene editing system of any one of claims 4-24, further comprising a transposase, integrase, or homing endonuclease.

29. The gene editing system of any one of claims 4-28, further comprising a retrotransposon.

30. The gene editing system of any one of claims 4-29, wherein the reverse transcriptase comprises a processivity of at least about 2-fold more than Moloney Murine Leukemia Virus (MMLV) reverse transcriptase.

31. The gene editing system of any one of claims 4-29, wherein the reverse transcriptase comprises a processivity of at least about 2-fold less than Moloney Murine Leukemia Virus (MMLV) reverse transcriptase.

32. The gene editing system of any one of claims 4-31, wherein the reverse transcriptase comprises an error rate of less than about 2.5%, 2.0%, 1.5%, 1%, 0.5%, 0.25%, 0.10%, or 0.05%.

33. The gene editing system of any one of claims 4-32, wherein the reverse transcriptase comprises an error rate of less than about 2.5%, 2.0%, 1.5%, 1%, 0.5%, 0.25%, 0.10%, or 0.05% as compared to Moloney Murine Leukemia Virus (MMLV) reverse transcriptase.

34. A gene editing system, comprising:
a) a nuclease;
b) a guide nucleic acid configured to form a complex with the nuclease and to hybridize to a target nucleic acid sequence; and
c) a reverse transcriptase having at least about 80% sequence identity to any one of SEQ ID NOs: 161-629, 767-1220, 1959-2522, and 2582-2585 and configured to form a complex with the nuclease.

35. The gene editing system of claim 34, wherein the nuclease is a double strand nuclease.

36. The gene editing system of any one of claims 34-35, wherein the nuclease is a Type II CRISPR endonuclease.

37. The gene editing system of claim 36, wherein the CRISPR endonuclease is Cas9.

38. The gene editing system of claim 37, wherein the Cas9 is catalytically dead Cas9 (dCas9).

39. The gene editing system of any one of claims 34-38, wherein the nuclease and the reverse transcriptase are fused.

40. The gene editing system of any one of claims 34-38, wherein the nuclease and the reverse transcriptase are linked by a linker.

41. The gene editing system of claim 40, wherein the linker comprises at least 10, 20, or 30 amino acids.

42. The gene editing system of claim 40, wherein the linker comprises about 30-35 amino acids.

43. The gene editing system of claim 40, wherein the linker comprises about 30 amino acids.

44. The gene editing system of claim 40, wherein the linker comprises at least 80% sequence identity to SEQ ID NO: 103.

45. The gene editing system of claim 40, wherein the linker comprises at least 80% sequence identity to any one of SEQ ID NOs: 155-160.

46. The gene editing system of any one of claims 34-38, wherein the nuclease and the reverse transcriptase are not linked.

47. The gene editing system of any one of claims 34-46, wherein the guide nucleic acid further comprises a primer binding site.

48. The gene editing system of claim 47, wherein the primer binding site is on a 3′ end of the guide nucleic acid.

49. The gene editing system of any one of claims 47-48, wherein the primer binding site comprises at least 2, 4, 6, 8, 10, 13, 16, 20, 24, 28, 32, 36, 40, 45, 50, 55, 60, or 65 nucleotides.

50. The gene editing system of any one of claims 34-49, wherein the nuclease is non-covalently linked to the guide nucleic acid.

51. The gene editing system of any one of claims 34-49, wherein the nuclease is covalently linked to the guide nucleic acid.

52. The gene editing system of any one of claims 34-49, wherein the nuclease is fused to the guide nucleic acid.

53. The gene editing system of any one of claims 34-52, further comprising a transposase, integrase, or homing endonuclease.

54. The gene editing system of any one of claims 34-53, further comprising a retrotransposon.

55. The gene editing system of any one of claims 34-54, wherein the reverse transcriptase comprises a processivity of at least about 2-fold more than Moloney Murine Leukemia Virus (MMLV) reverse transcriptase.

56. The gene editing system of any one of claims 34-54, wherein the reverse transcriptase comprises a processivity of at least about 2-fold less than Moloney Murine Leukemia Virus (MMLV) reverse transcriptase.

57. The gene editing system of any one of claims 34-56, wherein the reverse transcriptase comprises an error rate of less than about 2.5%, 2.0%, 1.5%, 1%, 0.5%, 0.25%, 0.10%, or 0.05%.

58. The gene editing system of any one of claims 34-56, wherein the reverse transcriptase comprises an error rate of less than about 2.5%, 2.0%, 1.5%, 1%, 0.5%, 0.25%, 0.10%, or 0.05% as compared to Moloney Murine Leukemia Virus (MMLV) reverse transcriptase.

59. A gene editing system, comprising:
a) a nickase;
b) a guide nucleic acid configured to form a complex with the nickase and to hybridize to a target nucleic acid sequence; and
c) a reverse transcriptase configured to form a complex with the nickase, the reverse transcriptase having a X₁X₂DD motif, wherein X₁ is F or Y, and wherein when X₁ is Y, X₂ is A, R, N, D, C, E, Q, G, H, I, L, K, M, F, P, S, T, V, W, or Y.

60. The gene editing system of claim 59, wherein the X₂ is A or I.

61. The gene editing system of claim 59, wherein the X₁X₂DD motif is YADD (SEQ ID NO: 2572) or YIDD (SEQ ID NO: 2573).

62. The gene editing system of claim 59, wherein the X₁X₂DD motif is FADD (SEQ ID NO: 2574), FVDD (SEQ ID NO: 2575), FIDD (SEQ ID NO: 2576), or FLDD (SEQ ID NO: 2577).

63. The gene editing system of any one of claims 59-62, wherein the reverse transcriptase has at least about 80% sequence identity to any one of SEQ ID NOs: 161-629, 767-1220, 1959-2522, and 2582-2585.

64. A gene editing system, comprising:
a) a nuclease;
b) a guide nucleic acid configured to form a complex with the nuclease and to hybridize to a target nucleic acid sequence; and
c) a reverse transcriptase configured to form a complex with the nuclease, the reverse transcriptase having a X₁X₂DD motif, wherein X₁ is F or Y, and wherein when X₁ is Y, X₂ is A, R, N, D, C, E, Q, G, H, I, L, K, M, F, P, S, T, V, W, or Y.

65. The gene editing system of claim 64, wherein the X₂ is A or I.

66. The gene editing system of claim 64, wherein the X₁X₂DD motif is YADD (SEQ ID NO: 2572) or YIDD (SEQ ID NO: 2573).

67. The gene editing system of claim 64, wherein the X₁X₂DD motif is FADD (SEQ ID NO: 2574), FVDD (SEQ ID NO: 2575), FIDD (SEQ ID NO: 2576), or FLDD (SEQ ID NO: 2577).

68. The gene editing system of any one of claims 64-67, wherein the reverse transcriptase has at least about 80% sequence identity to any one of SEQ ID NOs: 161-629, 767-1220, 1959-2522, and 2582-2585.

69. An isolated reverse transcriptase having at least about 80% sequence identity to any one of SEQ ID NOs: 161-629, 767-1220, 1959-2522, and 2582-2585.

70. A nucleic acid encoding for the fusion protein of any one of claims 1-3 or the gene editing system of any one of claims 4-68.

71. The nucleic acid of claim 70, wherein the nucleic acid is a DNA or an RNA.

72. The nucleic acid of claim 71, wherein the RNA is an mRNA.

73. A vector comprising the nucleic acid of any one of claims 70-72.

74. An adeno-associated virus or a lipid nanoparticle comprising the nucleic acid of any one of claims 70-72 or the vector of claim 73.

75. A cell comprising the nucleic acid of any one of claims 70-72 or the vector of claim 73.

76. The cell of claim 75, wherein the cell is a human cell.

77. The cell of claim 75, wherein the cell is a eukaryotic cell.

78. The cell of claim 75, wherein the cell is a mammalian cell.

79. The cell of claim 75, wherein the cell is an immortalized cell.

80. The cell of claim 75, wherein the cell is an insect cell.

81. The cell of claim 75, wherein the cell is a yeast cell.

82. The cell of claim 75, wherein the cell is a plant cell.

83. The cell of claim 75, wherein the cell is a fungal cell.

84. The cell of claim 75, wherein the cell is a prokaryotic cell.

85. The cell of claim 75, wherein the cell is an A549, HEK-293, HEK-293T, BHK, CHO, HeLa, MRC5, Sf9, Cos-1, Cos-7, Vero, BSC 1, BSC 40, BMT 10, WI38, HeLa, Saos, C2C12, L cell, HT1080, HepG2, Huh7, K562, primary cell, or a derivative thereof.

86. The cell of claim 75, wherein the cell is an engineered cell.

87. The cell of claim 75, wherein the cell is a stable cell.

88. A method for modifying a double- and/or single-stranded nucleic acid, comprising contacting a cell using the fusion protein of any one of claims 1-3 or the gene editing system of any one of claims 4-68.

89. A method for modifying a double- and/or single-stranded nucleic acid, comprising:
a) providing a cell with a guide nucleic acid to bind to a target strand of the nucleic acid;
b) providing the cell with a nuclease or nickase to cleave the nucleic acid at a location of binding of the guide nucleic acid;
c) providing the cell with a reverse transcriptase to synthesize a modification in the target strand of the nucleic acid at a location of cleavage by the nickase and/or nuclease.

90. The method of claim 89, wherein the reverse transcriptase has at least about 80% sequence identity to any one of SEQ ID NOs: 161-629, 767-1220, 1959-2522, and 2582-2585.

91. The method of claim 89, wherein the modification is an insertion, deletion, or mutation.

92. The method of claim 89, further comprising providing an RNA or DNA template.

93. The method of claim 89, wherein the nucleic acid is a genome or a vector.

94. The method of claim 89, further comprising providing the cell with a transposase, integrase, or homing endonuclease.

95. The method of claim 89, further comprising providing the cell with a retrotransposon.

The application's sequence listing, which the Patent Office published only in electronic form, follows.

SEQUENCE LISTING (2585 sequences)

SEQ ID NO: 1 - DNA, 2154 bp, synthetic construct
  source 1..2154: mol_type = other DNA; note = MG151-80_cloned_into_untethered_plasmid
gctagcgccaccatgtacccctatgatgtacctgattatgcttctggcggcagcagcggcggctcaagcggaagtgaaacacctggaacttccgaaagcgctacgcctgaatcttctggtggatcttctggcggatcttccgcatgccccttgcgcgtcgaggatgagaccaaaattaaccccgaagtgtggtatactccagataccgtcggcaagttgaacgtggaaccgtttatggtgacaatccgggaccccgaagttccagtgcgcataaagcaatatccgattcctttggaaggcaggcaagggctcaaacctgaaatacaaaggctgattaagcagggcttacttgaaccgtgcatgagcccattcaacaccccaatactgccggtaaagaaggccgatggcgggtaccgcctcgttcatgacctcagagagattaataagaggaccgtgaccagatttcctgttgtcgcaaatcctcataccctgttgtcccaactgggtccaaatgatcgatggtatagcgtcatcgacttgaaggacgcgttttgggcttgtccgttgaaggaagagtgtaggaattattttgcattcgaatgggaagatccagacacacaccgtaaaactcagttaagatggactgtccttccccaggggtttactgagtcacctaatcttttcggtcaagcacttgaacaaatattgcaggattaccaaatcggagatacacttactctcgtccaatatgtcgacgatctcttgattgcaggcgaggacgaggagcgtgtcagggaagaaagcatcaaattactgaattttcttagtctcaaaggacttaaggtgtctaagtcaaaacttcagttcgtcgagaaagaggtgaagtacctcgggcataggctttctcaaggaactaagaaactcgaccctgaacgggtcaaaggaatactgagtctcccatcccctaaaacaaagaaacaagtacggcaactgcttgggctgtttggttattgcaaacaatggatcgaaggttattccggaaaagtaaaattcctctataccaagataactaagaacggtctgttgaaatggacgcaagaagacgatcaacggttaaaagagttaaagactgagcttgtgaatgccccagttctgagcttgccagacctcaaacgtcctttctttctgtttgtcaatacagaggaaggaaccgcttttggcgtccttgcacaggagtgggcgggcaagaagaaacctgttgcttatatttcaaagcttttggatcctgtcagcaggggctggccaacatgtctgcaagttgttgtcgctgcggctctgttggttgaagaggcccataagattacatttgggtctgaactgcgagtactctctccccacaatatccgtggcgtccttcaacaaaaggcagagaaatggataacagatgccaggctggtcaagtacgaagcgattcttattacttctccccatttgaccttggagactaccagtctccaaaatccagcgcaattcctctacggggaaccatcacaagacctgttccatgattgtctgcgcaatattgaggaacaaaccaaaatacggccggacctggaagaagaagagcttggcaaaggggaaaagctgttcgtggatggatcttctcgcgtagtggaagggaaaagaaaatctggctacgcgattattgacggtaagacttttaaagttattgaatctggacccttaagcccgtcttggtcagcccaagcctgtgaactttacgcggtactcaaggcccttcagcttctcaatgggaaagtagggaccatatataccgattctcgctatgcctttggcatagtccacactttcggtaaaatttgggaagaacggggcctgataaattcaaggggcaagagcttagtgcatcaagaactcatctcacagattctgcaggcaatcaggggcccgagcgaaatagcggtggttcacgtaaaagggcaccaacgcggattaaaccccctggtaagagggaataatctggcggatcaagaggccaagcgggctgcactgtcagctctggaccttcctaggcctaagaagaaaagaaaggtgggtggttctcctaagaaaaagagaaaggtctgagaattc

SEQ ID NO: 2 - DNA, 2160 bp, synthetic construct
  source 1..2160: mol_type = other DNA; note = MG151-81_cloned_into_untethered_plasmid
gctagcgccaccatgtacccctatgatgtacctgattatgcttctggcggcagcagcggcggctcaagcggaagtgaaacacctggaacttccgaaagcgctacgcctgaatcttctggtggatcttctggcggatcttccgcatgcgctctgacagaagtcgatgaacaggagatcgccgacaaggtttgggccgagaaaggcggcgccagtagaatgcaaatatcaccaatccaagtccaagttaagccaggggttacaggcctttgtacaccccaatatcccatgtcccgtaaaggccgggaaggccttaagccagttattgagcggctgcttgagcaaggtatgctcgaacctacaatgagccccttcaattctccgattcttgctgttgctaagaaagatggtaaatatcgtttggttcaagacctgcggaatatcaataaagttatcgtcccgagatttccaacagtacccgatccctatacaattctgggtatgattccaaccgaacataggtggtttacagtgatcgatttaaaggatgccttttggtcttgccctctggacgaggacagcagacccctctttgcctttgagtggaccgatccggaaactggaaagaaaggacaactgcggtggaccgtcctgccacaaggctacactgagtcccctttgctctttggtcaagctctgtccgaaaagctccaagagtttgacaaaggacccggcataaccctcgtccaatacgtggatgatctgcttctctctggaaagaagcgggaagaagttcgtcagggatccatcagactgttgaactggctctccaaccaaggattgaaggtttctaaagagaagctgcaatttgtcgaacaaaaggtaaaatacctcggccactatctgcagcatggtactcgaagtttagatcccgaaaggattcggggaattatggaattgcaacccccacgcaataaaactgaggtgcgtaaggctcttggaatgattgggtattgtcgcctgtggttggatcaatatgcagtgttggccaagtttctgcatcaaaagttagagggccctggtgatcaagtggagtgggtggaaactgatagccaaaagtgggagacgctgaaagaggccctgaccagcgcaccagtgcttgcactgccaaactccaaactcccgtttcatctgtatgtatctgtcgcacaaggcgtagcaattggtgtactcgcacaaaagcgtggcggcaagtatcagcctgtagcctacctgtcaaaagaattggaaccagtcgtgaaaggctggcctgtatgtgtccaagctgttgctgccgcagcagttttggtcatcggctctaagaaactgacttttggtggtgctctcatagtgcattcacctcatcaggttaaccctgtcttgtcacagttagctaccacctggatgactgaggggcgattgctgaagtacgaaactatcttacggactagcccagacgttgtcattggcaccgacagaaacttaaacccagctgagttcctgtcaggggaacgtaaagaatgggaacccgaggatcacgattgcttgagccttgttgaaatgcttaccaaagtacgagaggatcttgaagagacacccctggaagaaggggagaagtggttcatcgatgggtcctcacgtgtggaagagggaaagcgcaagtcaggttatgctatcgtagatggggttggcgaggtcatagagaagggagccctttctcctacttggtccgctcagaagtgcgagctgtacgcactggcgcgggcattagaacttgccgaggggatcagagccacaatttggactgactccaagtttgcgtggggcgttgtacataccttcggcaagatatggcaggaaaggggttacataaaagcaaacggcaaagaagtagaacatgtccaactcgttgaccggacgttggaagcccttaaactccccgacaaggtcgctattgtacacgtcgccgcgcatcagaaaggtgatacccctgagatagttggcaataggtgggctgacaaatgggctaaagaagccgccggcgaactgacactcgctcctaggcctaagaagaaaagaaaggtgggtggttctcctaagaaaaagagaaaggtctgagaattc

SEQ ID NO: 3 - DNA, 2172 bp, synthetic construct
  source 1..2172: mol_type = other DNA; note = MG151-82_cloned_into_untethered_plasmid
gctagcgccaccatgtacccctatgatgtacctgattatgcttctggcggcagcagcggcggctcaagcggaagtgaaacacctggaacttccgaaagcgctacgcctgaatcttctggtggatcttctggcggatcttccgcatgcccactcaccatggatgaccagaatcaaatcaacccggatgtgtggtattcacccgacacaatcagtaaactcgagattccacccattaagatccaaatttccgaacctcacattccggtccgcgttaagcaatatcccattagccttgaaggaagacgaggcctcaaacctgagattgataggctgctcacccaagggatattagaaccctgtatgagtccctttaatactccaatccttcctgtgagaaagcccaatggaaagtaccgcttagtccacgatctccgagaaataaacaaacgaaccataacacggttccccgtggtggcaaacccgtacacattgctttctaaactgggacctcataactcatggtactcagtggcagatctcaaagatgcattttgggcttgtcctctcgctgaggagtgcagagattactttgcatttgaatgggaagatattgagaccggacgccgccaacagctccgctggacggtactccctcaaggtttcactgaaagcccgaacctctttgggcaagcgctcgaagagttgttaaaggaataccaagttcaaaccggaaatgtgctcttgcagtatgttgacgaccttctcatagccggcaacaataaagaagacgtacgaaaggagtccatcaggttattaaactttcttgctcagaaaggcctgcgggtctcacaggagaagcttcagtttgtcgaggaaaaggtgaaatatctgggacattacttgtttaatggcaagaaaattctggatcccgaaaggattaaaggcattttggaactccccatgcctgtgactaagcgacaaattcgccaagccctcggacttttcggatattgcagacaatggatcgaaaactacagttttaaggtgaaatttctctatgaacagctctccaaagataaaattttaaagtggacgccacgcgaccaagagcaatttgcaaatcttaagcgagaactgagtcaagctccagtgttaagcttgcctgatctcaaaaggcctttccatcttttcgtaaatatacacgaggggacggcattcggagttcttacacaggaatgggcaggccaaaagaaacctgtggcatacctgagtaagttactggaccccgtctcccggggctggccaagttgcctgcagatcatagtagctgcagcattgttgctggaagaaacgaatcgcattactttcaatggtgaagtagtgctctacgcaccccataatattaggggtgttctccagcagaaagctgagaaatggctcacagataacaggctgctgaaatatgaggggatcctcatagaaagtccaaagtttagccttaaaacgattggagccgttaacccagcggaatttctgtaccccggcgaaggtaatgaactccttcataactgtttccaaacaatagagcagcaaacacggattcgcccggatctggaagaggaagagttgcagtgcggggaagtattgtttatcgatggatccagtcgcattgtcgaaggcaaaagattgagcggctacgccattgttaagctcgagaaaggtgaatttaagacgattgaaagtggcccacttagtgcatcctggtccgctcaagcctgcgagctttatgctctgtggaaagcactggtgagtttaaaaggaaaagatggcacaatttatacagattccaggtatacctttggggtagtgcatacctttgggaaaatatgggaagaacggggctttataaactcccaaggaaaagagctgatacatccagagttgatccggcgtgtgttgggcgcattgaaagtccctaacaaaatcgccgtcgtacatatcaaggggcatcaacgcggaacaaattatcaggttagagggaataatgctgcagacattgaagctaaacgcgtggcagggaattataacaccatcttgacaattcaacctaggcctaagaagaaaagaaaggtgggtggttctcctaagaaaaagagaaaggtctgagaattc

SEQ ID NO: 4 - DNA, 2157 bp, synthetic construct
  source 1..2157: mol_type = other DNA; note = MG151-83_cloned_into_untethered_plasmid
gctagcgccaccatgtacccctatgatgtacctgattatgcttctggcggcagcagcggcggctcaagcggaagtgaaacacctggaacttccgaaagcgctacgcctgaatcttctggtggatcttctggcggatcttccgcatgcccacttagggtcgaagatgagaaggaagtcaatcctgaagtgtggtacacgcctgaaaccatagggaagcttcaaatcccgccattcagcgtgacgataatcaaccctgaagttcccatcagaataaaacaatatcccatcccacccgagggcaagtggggactcaaaccggagattgaaagattactggagaaagggcttctggagccctgcatgtctcccttcaataccccaatacttccagtcaagaaaagcgatgggagctaccgtttagtccatgatcttcgcgaaattaacaaacgcacggttacccgcttcccgattgtagcaaacccttacactcttttatcccgcattggccctgagaatcactggtactccgtaatagatcttaaggatgccttttgggcttgtccgttaagcgaggaatcccgcaactatttcgcgtttgagtgggaagatcccgaaacccaccgacggcaacaattgcgttggaccgttctgcctcaaggttttactgagtctcctaacttgtttgggcaggctctcgaaaagattctgcaagaatatgtcgtgaatgagaatacaattctcattcaatacgttgatgacttgctgattgcaggtaaagaagaagctattgttcgacaagagtccataaaactgctcaactttctggctcttaagggattaaaagtgagcagatctaaattacagtttgtcgaagaagaggttaagtacctcggtcattacctctccaaaggtgaaaagcggatcgatccggaaagggtcaaaggcatactcagcataccaccacctaccaataagaaacagataaggcaattgctcggactcgtcggatattgccgccaatggatagagaactattctagcaaagtgaagttcctttataacaaactctctcaagataatttgctgaagtggacaatggaagatgagcaacacctcgaacaactgcgaaaggatctgataaccgcacccgtgctctcccttcctgaccttaaacggccattttccttatttgtaaacacagacgaaggcactgcctatggcgttctgacccaagactgggccggcaagaagaaaccagtaggttatctttcaaagctgttggaccctgtctctaaagggtggcctacgtgtctccaagcagtggtggctgccgccctgctcgtagaggaagcaaataaaatcaccttcaatggtgagctgcgcgtcctgtcacctcacaatattcggggcatattacaacagaaagctgagaaatgggtaaccgattcccggctcttgaagtacgagggtattcttatcgatagcccgaaactgagtcttgaagttactacccttcaaaaccccgctcaattcctgtatggggaaccctgggacagtcaactcattcatgattgctttattacaatcgaaagccaaacaaagattagaccagatctggaagaagaggaactgggtgagggtgaaaagctgtttgtagatggcagctcccgtgtcgtgaatggtaaacgcaagagcggatacgctatcattaaaggccctaacttaaaggtgctggaatctggaccgctgaaccatagttggtccgcacaagcttgtgagctctacgccgtgctccgtgcccttgaatatctgcggaataaagtgggtacaatattcacagactctaaatatgcttacggcgtcgttcatactttcggcaagatttgggaagaaagaggattgataaactcccagggtaaagatataacccatcaagagctgattgtccaaatcctcaaagcgctccgcagcccgaagggaatagcagtagtccacctgaaaggacatcaaaagggagttgatatcaggaacaggggcaacaatgttgctgaccgcgaggcaaaacgcgccgccttaaaagattggactccacctaggcctaagaagaaaagaaaggtgggtggttctcctaagaaaaagagaaaggtctgagaattc

SEQ ID NO: 5 - DNA, 2181 bp, synthetic construct
  source 1..2181: mol_type = other DNA; note = MG151-84_cloned_into_untethered_plasmid
gctagcgccaccatgtacccctatgatgtacctgattatgcttctggcggcagcagcggcggctcaagcggaagtgaaacacctggaacttccgaaagcgctacgcctgaatcttctggtggatcttctggcggatcttccgcatgcgtgctccgtgaagaggacgaaaagaaaatcaaccctatagtctgggctaaaccaggcaaccctgggttaatgaacgttacacctgcgaaaattcatctgaaaactgataccccagtgtatcggcctcaatacccaattcgtccggaagcagaagagggtttaaaacccgttgtgcgcgagttgcttgatgatggacttatagaacctagtgattcaccctactgcactcctattttgccagttaagaaacccaatggcacttggcgcatggtgcaagatctgcgtgaggtaaacaaagtcgttatacctcgagctcctattgtcccagatccacataccatccttcggcgtattcccgatacgcacgtatggtataccgtaattgacttgaagagtgccttcttcagcgtccccgtggaccccgaatctcggcctatatttgcatttcaatggccccacccggaaaccggaaagcttacccgctttcaatggaaaatattgtgccaaggttactgcgaatcaccgaccatctttggagaaatactcgaagaactcttgcaggggtggtctccccctgaaggcacactcctgacccaatacgtggacgatttgcttatttctggagaggaagggaaacaggttcgaaaggcatccatcagtctgctcaattttctgggcgagaagggcttgcgcgtatccctggacaagttgcagttttgcgagccagaagtgaaatacttgggacttattctcaagaaaggaactaagtgcataaaccctaaacgtctggaaggtatacagaacttagaaatgcccaagacaaaacgccaactgcgatcatttatcggaactataaatttctgccgccaatggatcgaaggtttctctgagctcattcagcccttcttgaagaaattactcaaggaagagccagaaacactggtcctggaaaaggctgactacaaattgtttgagagagtaaagaaagtattggtgtctgcccctgcgctggggttacctaaccccaacaaacccactcacctgtttgtgacaaccggcaatggagtggctaaaggcgtactggcacaaaagaaggctgggcaataccaaccgataggatatctctcaaagcacttagacgcagtggtgctgggctggcctacatgtctccaagcgtgcgccgccgctgccgaactggtcaaacttactcggaaattgtatccctttgaagccattgttttgcacagttcacatcagttaaagacgattttgacgcatacagctagacgatggatgactgacagccgcttgctccaaatcgaagccattttgctcgagaagcccgacctgctgttgacaaccactgatcattatggtcctgctggcggcctttccgaagcagtccggaaagaaatgtgtaatgaacacgactgtatcgcgatcactgacctgcaaaccaaatttcgcgaagatctgcaagaggagcctattgaaggggcatggaatttgtatactgacggatcttcacgcgtggtcaacggtaagagaatcaccggatatgcaatcgtagaagacggtgggttggaagtcgaaacgggaccccttccaccaagtatgagcgcgcaaacagctgaactgtacgccctgaagcgcgctttggagattggcaaagaaaagaatgtgaacatatggaccgattcaaaatacgcgtgcggagtcgttcatgtatttgggaaaatatggagcgagcgtggtcttcttacaagccaaggcaagaatttggcacatcataggctcgtccttgataccttggaagctctttcttttccttcaagagtcgcgattatacatatccccggtcaccagaaaggaaatgcacccgagatcgtaggaaatcgcctggctgacgaactcgccaggcgggccgccgaacgagagttcgatactgccaggcttgccgcccttattcctaggcctaagaagaaaagaaaggtgggtggttctcctaagaaaaagagaaaggtctgagaattc

SEQ ID NO: 6 - DNA, 2148 bp, synthetic construct
  source 1..2148: mol_type = other DNA; note = MG151-85_cloned_into_untethered_plasmid
gctagcgccaccatgtacccctatgatgtacctgattatgcttctggcggcagcagcggcggctcaagcggaagtgaaacacctggaacttccgaaagcgctacgcctgaatcttctggtggatcttctggcggatcttccgcatgcgagggcgccgacgaaattctcaataaaataccagaaggggtttggtccactggaccatatgatgtggggttctgtaagaagtataaaccaattgaattaacagtgtccgatacccaagtggtgtatcggaaacaatatcagtggccagcggaagctgatagcggaatggaagagacactccgtggcctttggcaagccggcgtgttagaagaaagccactcattgtggtccacacctttgaggccagttaagaaggctgacggggtttcctacaggatggcacatgatttaagggccattaacgacgcgatcatgaccccagtgctccctgtccctgaccctcacaggattctgacaagtctgagcccgaacctgaaatggtttactgtgatagatttggccaatgccttcttttgccttccgctgcatcctaatacgaggaaatatttctcttttacatacaagcatacacggctgcaatataacaggctgccacaaggctgtaagaacagtccagggcttttcaaccaagccttgaaggatatgctcagtgatctccaacttcctaacaattgtgtcttggtgcaatacgttgatgaccttctgctcgcttgcgaaacaccagaagtctgtcttgaagccactaagcggctgttactgaaattacacagctgtgggttcaaggttagccggaagaagcttcaatgctgccgcaaggccgtcaattttctcgggagagtggtgagcgcgcatggtagcactatgtctacagctcataggaacgccattttgcatcatcccaaaccggaaaccgtcaaggatatgctcagttttctcggactttgtggatattcaaggaactatatcagctgtttcgtagagcgcattgccccactgcgcgccctgataagggagaaaggaaataagaataccactgcgcaactcaactggaccgaagaggcaacaaactgttttatctcacttgtcggagcccttgccagcgccgcggctcttgcagttccaaactacgatctccccttccacctcaacgtgtccctgtccgcatcagttgtcaacggagtgcttttccaaaagagagacggcggtagatgcgtgatgatgtactgttcaacaaccttggaccccatggaacaaaagcaaccacaatgtacccgttacgccgcggggctcgcgacgctcatcactaagaccgcacacatcgtgaaagggtatccactgaatatcttgactgagcacagcgtcagtgcgtatgttgcgtccgccagttttaccatgagctcactgcgacagactaggctcatgaaaatactccaagcacctaacattcaatatgttcacacagggatcaacatggccgactgtattggagcaactggaaccccacatacatgcgtgtttcaagtacaacaagacttgaaacttaggcccgaccttcaaacatcccctctgggccggggacatcttgcctttacagacggttgttgttatcgacaaacggacggctccctgcgggctgcagcggcagtggttcgatatgattccggtagtgacgtctttaccacagtcgctacggtccagttaccagatagccctagcgcacaagccgcagaagttctcgccctttgtttagcactcgaagcctacgtcgatcaagaggttaccgtatattcagattctgcgtacgctgtcagcgccgctgttctggatcttgccgcatggaagcgcactggctttgtcaccgctaaaggagtccctatagcacatagaagcctgatggaacggttggctgtatctattatgttgccgcgggcggttgctattgtaaagacagcagggcatagcaaggctaacacaatgacggcgcgcggcaacgatgcagctgatcgtgctgccaagaaggctgccggttatcaacctaggcctaagaagaaaagaaaggtgggtggttctcctaagaaaaagagaaaggtctgagaattc

SEQ ID NO: 7 - DNA, 2160 bp, synthetic construct
  source 1..2160: mol_type = other DNA; note = MG151-87_cloned_into_untethered_plasmid
gctagcgccaccatgtacccctatgatgtacctgattatgcttctggcggcagcagcggcggctcaagcggaagtgaaacacctggaacttccgaaagcgctacgcctgaatcttctggtggatcttctggcggatcttccgcatgcacccctgaagagaaagagacattgctcgctgatgttccagctagtgtttgggccaaggattcatacgacattggaacactgacaaccgccccaccgctcataattaaagcaaaacctctctcccggtaccccgctaaggcccaataccctctttccaaggaagccgaagagggcatagagccaacctttaatgccctgttggaaagaggcgcaatcgttccctgtccttactccccctgcaatacccctatcctgccgatcaagaagccggataatacttggcggtttgtacaagatttacgccttgtcaatgaggctgttgaaccgcggcatcctatagtgccaaacccttgcacaattctgagtacaataccatccaatgctaaatgcttcaccgttatcgacattaagaatgcctatttctcaatcagggtcgaccctgcttcccaattttggttcgcatttacatacaagggtcaacgctttcagtgggccagattggcccaaggatatgtggagagtccttcctacttctgtgaatgccttactgaatgtctgtccaaattcaccccgcccggcggcagcacgattatctcttatgtcgatgatattcttctgtcatctcctagcaagaaggtttgcaaaatggacaccgtggcactgctcacatatctggctatagtgggactcaaagtgtctaaacaaaagctgcaactctgccaagaacgcgtaaaataccttggacacatattaaccccggggtcacgagctctcgatgcctctcgaattagtgcaataacggcctgtccgagacctaaaactaaacaacaactgctccggtttctgggaatgacaggatattgtcgggcctggatattacattatgctgaacgtgctcaaccattgcaatcctgtgcgaacgcatgtaagaacttgactgacaacttaacctggacagatgattgtgacaaggctttcgtggacctgaaagtcgctttggccagtacacctgcattagggctccccaactatgacctgccattccatttatttgtgtgtgagaaagccggatttatgagtggcgtgttatgtcagcaacatggcggtcaatatagaccagtcgcctatctcagtaaacatttggacccagttgcccgcggcatgatcccgtgcttaaaagccgtcgccgctgctgcctcaggcgtattgagctgtgctgaccttgtgcttcttcatcctctcacagtccacgtgccacacgaagtacattctctcctgatgcaagcgaagacttctcatttaactccagcccggttactctcctatcagcacgtgttgctcacgctgtcccatgtcacactggcacggtgcacttctttgaatcctgccacattgctgccgacccctgatgatggggacactcatgattgctgcgaggttgtgtcaatttgtacaaagcctcgtcctgatatcagcgaaatccctctgaccaacccagatttggttttcttcgttgatggctccagcatgaggcttgggagtggggaagtcggcagttcctatgctgtcgtgaatcattttgaagttgttgaggcttatagtattccgggaacctacagcgcacaagctgcagaattggttgcgctcttgcgggcttgtatcctcgctaaagggaagagcgtgtgcatatatactgattctcgttattgttggggcattgttcacgaccatggcgcgatatggaaagaacgcggattcttgacagcggcaggcaaacccatccagcataaagatctcatcgctagtctgttggaagcaattcagtttcctgcatctgtagcagtcatcaagtgcaccgctcatagcaaccataaagacgaggtgtcaagtggtaataatcgggcagacgctgctgcaaaagccgctgcgaagggtggccaacggatccctaggcctaagaagaaaagaaaggtgggtggttctcctaagaaaaagagaaaggtctgagaattc

SEQ ID NO: 8 - DNA, 2169 bp, synthetic construct
  source 1..2169: mol_type = other DNA; note = MG151-88_cloned_into_untethered_plasmid
gctagcgccaccatgtacccctatgatgtacctgattatgcttctggcggcagcagcggcggctcaagcggaagtgaaacacctggaacttccgaaagcgctacgcctgaatcttctggtggatcttctggcggatcttccgcatgcaaccatgttagggccgacgagatgctggcaacaatcccggaatccctgtggacttcccatccccatgacgtggggcgcatcgagggcgaagtggtactgactctcaagcctaccgtgaccaaacccatatggcgcgctcagtataaacttaaacccgagcaagttgaaggaattgccgagacggtaaccggccttctcagagccggagttttaagggaagcagaaggtgcacgctggaatacaccaattcttccagtacctaaggctgggaacaaaggctggcggatggtgcacgatttgaggctgatcaatgaagcgaccacaacccttgccttgccagttccggatccctatgttgcgctccgagcaatcacacctgaacagaaattcttcagtgtctgtgacctcgggaatgcgttcttttgtctgccgttggccgaggaatgtcaagaatggttttccttcacgtacggcaacaaacaatacacatatacaagacttgctcaagggtacaaagactctccaggcctgttcaatcaggccttgaaccaaattctcgaaaatatgatcttgcccgagggagcaacgattatccaatacgtcgacgatctcttggtcgccaccaagacagccgaagacagtctcgcagctactaagaccctcttaatgactctggcagacgccgggtttaaagtcaaacgtgaaaagtgtcaaataaccaggcggtctgtggagttcttgggcaggatcgtcggagagcatggaacagctatgagtgatatgcaccaagatgccattctccaatatggaaagccgaaaaccgtccaagacatgttgggctttctgggcctctgcggatacagccgcacctacgtgcccgaatacgttaccctgacacaaccattaagagaaatggtcactgaagtgggacaccgagctctcaaggatgatttaaactggacagtagacagggataaggcttttcaaaaggtgaaatccgcccttagcgcagcagctcatctcgcatcacctaactatgagaaagacttctatctggatgtcgcagaaaccgagggtattgtcaacgcggtgctgtatcaaagggagcgaggagaacgtaaaatcttaagttacttttcctgtaagcttgacagcgtagaagtaggcaagcccccttgcattaggtttctcgccgcacttgcgaaagccatagagaagaccgcccatatagttctttgccatcctttgatcgtcaatacagatcatagcgtgactgccctgttagcctcatctgccttctcattttccgccacccgtcaaatcaaaatcgatgacacgctgaaaggccctcatataatgttcaaagcacccaaggacaatcacgccaatatggcgaaaggcgtcaatggcggcgggcttcttcaacacgattgcataagacgggttgaaggggatagtaaactgcgagagaacctgcacgctaccccacttgatgacccagattgggaacttttcacggatggatgttcctataaaagcgacatcgggaacagggcgggctacgccgtggttaagtgggacaatgataaagccgacataatccaagccggagaaataccgcaacctgccagcgcgcaggtggcagaaatcaaagccttaactgaagctttgaaactgtccgcagggcataaagtgaatatctatactgattccgcctatggcttcggcgccgttcactatgagggcccagcgtgggtgcgacgtaaatttctgaccgccgccggcacgccggttaaacatgaacatcatctgcgagagcttatagaagctctgaatggccctacagaagtagcagtaatcaaggtgaccggacactcaaagaagaatgataaagagtccaacggcaacgcggcagccgacgctgccgcgaagctggcatgtaactaccctgttaagcctaggcctaagaagaaaagaaaggtgggtggttctcctaagaaaaagagaaaggtctgagaattc

SEQ ID NO: 9 - DNA, 2163 bp, synthetic construct
  source 1..2163: mol_type = other DNA; note = MG151-89_cloned_into_untethered_plasmid
gctagcgccaccatgtacccctatgatgtacctgattatgcttctggcggcagcagcggcggctcaagcggaagtgaaacacctggaacttccgaaagcgctacgcctgaatcttctggtggatcttctggcggatcttccgcatgcaatcaccctgatagcgatgacatcatcaacgcaatgccagcctctctctggagcaccggaccagctgatgtgggcaaactccagatacccccgatcaagattaatttgaaaccggataccgtgcctatatggaaataccaatatccattaagcagggagaaaatcgatggaataaggcctgtgattgaagatctccttcgaagcggcgttctgaggcaaacagtgtccgactggaatactcctattctgccgacgccaaagcccggcaagaatgtgtatcgcatggtgcacgatttgcggcctatcaaccaggtagtccttcctagccattgcaaaacgcctaacccgtttgtgatgctcactagcataactcctgatcataaattctttactgtgatcgatctcgctaatgcgttctttagtgttccgctgcatgaagattgccagaacatctttgcgtttacttatgaaaattctcagttctcctacacggtgttaccacaaggtcttaagaatagtcctagccttttcaacaatatactgaagacacatctcagcgaactcactcctcacctccctcccaatacggtgatcctgcaatatgtggacgatatcctgatagctgcaccttctactgccaagaatctgcaagctacttctctcgtactccattttctggcaactaaaggttataaggttagcaaggacaaactccaaatctgtcggccaacagtgcattatttgggtagattgattacttctggtgccacaagcatgtccccagagcacaaatctagtattttgaaccatccgaaacctaacactgggaaaagccttttgagtttccttggcctcacaggctactcaaaacagtttgttccaaattatcaggaccttgtctcacctctgagggccttgatcaggcaaaagggttacgctaatctcaatgctccccttcactggacgcccgaagcggaaatttgctttaccgcccttaaacaagcactggcccaggccactcaactcaacccaccagattattctctccctttccatctcgacgtcagtgaacaagagggaaccgtaaaagctgtgctgtatcaaaagcaaggcggcaccaggacggtgctgatgtattactcatctaagctcgacaatgtggagattggccatccaccatgtactcgccattgcgccgcaatcgccaaggctcttatcaaaaccgcgcatattgtgatgcaacatacagttcacgttcacaccaaccacggcgtagctgcctttctcgattccacggccttcactctctccaccaagcgacaacaaaagttaaagaatattttggatcaacccaatgttctgtataccagcgaaggcgttaatatggccgctgaaatttctactcaaggagagccacatgactgtgcggtcttggccgagaccgacatgaaaatcgtcgagaccctcacaccgaatcccattgagaaccctgacttagtgttattttgtgacggctctagtagacggcgcttggatgggactctgtccgccgcatatgctgtcgtgaagcttgttccaaaatcacaacttgtgaccatagaggccacacatatcggtaacaattccgcccagaaagccgaaataatgggtctgacagcagctctcaatcacgcccatggcaaaaccgtcaatatttacaccgattcagcttatgcccatcatgcagtatacgtcgatctccctcattggagcaggaaaggctttgttaccgcgaccggcactcctattaaacatttacccgaaatcatagcgctccaagaagcattgagtaggcccaaaggagttgcagtacttaagtgtaaaggccatcaatcagataacactatagtagctaagggcaatgccgccgccgatgaatccgcacgtcggttgaccgaagacgataaaatccctaggcctaagaagaaaagaaaggtgggtggttctcctaagaaaaagagaaaggtctgagaattc

SEQ ID NO: 10 - DNA, 2163 bp, synthetic construct
  source 1..2163: mol_type = other DNA; note = MG151-90_cloned_into_untethered_plasmid
gctagcgccaccatgtacccctatgatgtacctgattatgcttctggcggcagcagcggcggctcaagcggaagtgaaacacctggaacttccgaaagcgctacgcctgaatcttctggtggatcttctggcggatcttccgcatgcaccccatccatccctaatctgcacggagtccccagttccctgtgggcaacacacaaagaagatgcaggcctggttgcctgcgccccatatgaggccagcatcaaacataccgatccaatttacaagaagcagtacccgctcactgaagagaaggcgttgggtatagataaggtgctccatcaactccttctccaaggggtcgtggtcccttgcaagagcccttacaacacccctattaatcccgtaaagaaacccgatgggacgtggagactcactcaagatctgagagccatcaacgatataatcatacctgtctcccctattgtcccagacgtgcctaatatcatggcgagcataccgagctcacatacgcattttagtgttgtggacctttgttctgcgttcttctccatccctgttgaaccgcaaacccaacccctgtttgcattcacgcaccgagggcgccaatatacgtggactaggttaccacagggtttcgtggattccccggcagtattcgccttgactgtgagacaatgtctcactgacgtgtgccttccacctaactcttgtttcttacagtatgctgacgatatcttggttaccggacaggatgaagcaacatgtcaccaggctaccatcgccgtcctgcaaaggctcgccgagaccggcttcaaggtgagtccatctaagctccaactgtgcaaaaccagtgtaacatatctcggatatctgatcagccaaggcagtaaagccctgacaccttcaagggtgtctattatattggaaggaaagaaacccgcaaccaaacaagctatgatggcgttcttggggctcattaattattgcaggcagtggatacccgactgttcctattatgacaagtgccttagaagcgcattcacacatagcgatcctatgagttcccttatcacctggaccgaagaaatgacacaagcctatggtgcgctgaagaaagccctctgtagcgcgcctgccctcggcttaccgaattatgatttaccattccatttgtacgtcacccatcatgcggacactgcgagcgcagttctggctcaagagcatggtggaagcttccggccatgtgcatttctgtcaaagacactggatacggttgcgcagggcttgccgacttgcctcaaggctatggccgccgcggcccttatggtccttgacgcggagaagcttgtcttgggacatccgctggtgctccattgtgaacaccaaatccaatacatgcttaaacacctgtccacgcaacatttgtcagtacaacgccgatgcgggtatgagcaaaccttactggcaactgagaatttgactatcaagcctacttcttccatggatactgttgcccacgccctgcaaagatttctgcaagtgccggccgaccacttttctgaagaccataactgtgtagattccgttgtatccgattgctcactgcgccctgacctcaaaagtacccctcttcaaaatgtacgcaacctttacgtggacggatcttgtagcaagccacaagatggagtataccttacgggctatgcggtttgtgaactccccgatacagtcctggaagctgctgccataccctttagctctgctcaagccgctgaactcatcgcccttaccagggcgtgcgtccttgcagcggaccaagacgtcaacatctatactgactcccgctatgcttttggagtagctcacgactttggggccatttgggcttctcgtggattcgtcgctgctgatggtaagccgataagtcacagtagtcttgttatggacctcattaaagccgcccgtctgccgcgttctcttgctattattaaaacccggggtcattctactttcgatactgaagaggcgaaagggaataacttcgcagacactcaagctaaactggccgcccagtcaggaaaacaaccgcctaggcctaagaagaaaagaaaggtgggtggttctcctaagaaaaagagaaaggtctgagaattc

SEQ ID NO: 11 - DNA, 2193 bp, synthetic construct
  source 1..2193: mol_type = other DNA; note = MG151-91_cloned_into_untethered_plasmid
gctagcgccaccatgtacccctatgatgtacctgattatgcttctggcggcagcagcggcggctcaagcggaagtgaaacacctggaacttccgaaagcgctacgcctgaatcttctggtggatcttctggcggatcttccgcatgcagcacccaaatggaatccgatagtaaaagagaagaaatgcttcaaaaggtacctgaatgcctgtggagccaacattccacagacatcggactcgtcaaatcagcccaaccagttaaggtcgagcttcgtccgggcacctctcccccatggaagaatcagtatccgcttaaggaagaagctatccggggcatcgaaccccagatcgagggacttcttaaagctgacgtccttaaaattacgcaaaatcctcaaagtaacactccgctccttcctctgaagaagccagatggatcttaccgtcttgtgcacgacttacgggcagtgaacgaagtggtcgctgactttccagcagaagtgcctgatccacataccctgttggcacaaatcccgcctgatgcaacgcacttcaccgtgcttgacttgtgtggagccttcttttctgtacctctgtccatcgaatctcaaggattcttcggattcacatacaacggtcaattttacgaatcaaaacgactccctcagggatttaagcactcccctcatatctttaacaaggtacttcgtgaagatctcgccggtatcgatcaaattttgaagtcaacagtggtccaatacgtggacgatattatcatctgctctcccgacgaggagacatgtcataaagactccatcaaactcttgcaaatcttggcggaaaagggacataaagcttcccagaagaagcttcaatactgccgggagaaagtcatttatctcggtcaaacgattacaaagggacatcggtctatcagtgacagccatttggaagctataagaaaagcaccaaagcctcgcaccgtcagggagatgctgacttttctcggaatcgctggatactcatcaagctgggttgaggactacgcatccttgaccgggccacttcgggctatgatcaaagacacgggcaacgcacaattacactgtaatctgagttggacacaggatgggctgctcgcatttgagacgattaagcaacgtttacaagaagcccctgctcttgcactccctgattacagcaagaattttctgctttatgttagcacgtctaccggcggccggtatgcctgtgctgtactctgccaacccaccggcaccgggaccacacctcagcctatatcctactatagcaccgcattttccgaagttgaactgggtttgcccctttgttacagagcactcgttggagttagccttatgtacgacaaggcgtcatccgttacaatgggatacccagtaacgatcttaacgcatcattctgtgcgaaatcttttaaactatggcaaatataccctcactatgtctaggttgagggattatcatcggctgttggaacaagaggatgtcactctggtcaggtgcgtcactgtaaacccagccgaaagtcttcctaccagcgaagacggcgagccccatgactgtatccaagaaagtgaaaagtatagcaaactccgaagtgacctgcaagccttacctttgagcgaagccgacgtagagtactggaccgatggttcatgttaccgtgtcggagacaagctctctgcaggctacgcagtggtaaaagctcagggcactgaatttgtagtcgagaaagctggaatagtaccccagccagcttctgcacaactcgccgaactcgtaggacttaccgaagcatgtctcttggcagaagggaagagagtaaccatttacactgatagtgcctacgcacataatgtgtgtcatctcttcggcgccgtatggaagaaccgcggctttaagaaaacggacggaagtcctatccaacaccatgctcagatcatgaaattattgcacgctatgatgaagcccaaagaaatcgccatagccaaatgtgctgcacacaagatggatgtgagcaaggttacacaaggaaacaaggctgcagatgaggcggccaaagcggtgacaggggccgataaattgcctaggcctaagaagaaaagaaaggtgggtggttctcctaagaaaaagagaaaggtctgagaattc

SEQ ID NO: 12 - DNA, 2166 bp, synthetic construct
  source 1..2166: mol_type = other DNA; note = MG151-92_cloned_into_untethered_plasmid
gctagcgccaccatgtacccctatgatgtacctgattatgcttctggcggcagcagcggcggctcaagcggaagtgaaacacctggaacttccgaaagcgctacgcctgaatcttctggtggatcttctggcggatcttccgcatgctctttgactccttttgaacgagaagcattactggcatctgttcctgaaagcgcgtgggctaaagactcatatgacttcggcactttgaccacagccccaccgctggtgattcatgcgaaacccggcagccattttccggctaaagcgcaatacccactgagcaaagaagccgagaagggaatcgaagctacattcaaagctctcctggagcgtggggctatcgtaccctgccccagtagtccttgcaacacaccaatacttcccattaagaagcctgacaacacgtggcgctttgtccaagacctgaggcttgtgaatgaagctgtccaaccgaggcatcccattgtgcccaacccctgcaccatcctcagtagtctcccgcccgatgttaaatgttttaccgtgatcgatgtcaagaacgcttacttttctattagggtggacccttcttgccagttttggttcgcatttacattcaagggccaacgctttacttgggtgcgcctgccccaagggtatgtcgaaagtccatcttattttaacgaaagcctcgttttctgcctttctaaatttacgccacccggcggtagcacgattatatcatacgtggatgacattctcgtggcctcacctagtaaagagatgtgtaaaatggacactgtagccctgctgacttatctcgcaatcgtcggattaaaagtgtctaaacagaaattacaactttgtcaagaaagagttaaatatcttggacatattctgactcctggctgtcgggccttggacgcctctcgcatttccgcgatcactgcgtgtccgcggccaagaaccaaacagcaactcttgagatttctcgggatgacaggttattgcagggcctggatcctcgactacgcggagcgagcacagcctctgcaaacctgtgccaacgcttgcaagcatttaacagatcatattacgtggaccgatgattgcgataaggcttttgtagatctcaagctggcgctcgcttctgcacccgcgctggggatgcccaactatgaccttccatttcatcttttcgtttgcgaaaaggctgggtacatgtcaggggtgctctgtcaacaacacggcggtcaatatcgtcccgtcgcatatctctctaaacaactggatcccgtggcaagaggcatgattccctgcatgaaggccgttgcggcagccgccagtggtgtgctgagttgtgctgacattgtgttactccatcctgtaaccgtacacgttccacatgaagtacacagtttgctgctgcaagctaagacatctcacctgacgccagcccgccttctctcttaccaacatgtgctgttgaccctctcacatgtaaccctggccaggtgcaccacactcaacccagcaactttgctgcccaccgccaacgatggtgacacacacgactgctgtgaagtggtcacaatgtgcacgaaacccaggcccgacatctctgaaactccattctccaatccagatttgatattcttcgtggatggatctagtatgcgacttggatcaggtgaagtcggatcaggctacgcggtggttaatcagttcgaagtggttgaaagctactctctgcccgggacgttcagtgcacaagccgcggaacttatcgccctgttcagagcgtgcatcttagctcaaggaaaatctgcctgcatatatactgattccagatactgttggggcatcgtccacgatcacggagctatttggagagaaaggggctttctgaccgctaccggaaaaccaattcagcataaagacctcattgcgtccctgctcgaggctataaaatttcctacgagtctcgcggtcattaaatgcgcggcgcacaataatacgagcgacgaagtcagcttgggcaacaatcgtgtggatgccgctgccaaagcagcagccaagggcggagtcagaatacctaggcctaagaagaaaagaaaggtgggtggttctcctaagaaaaagagaaaggtctgagaattc

SEQ ID NO: 13 - DNA, 2166 bp, synthetic construct
  source 1..2166: mol_type = other DNA; note = MG151-93_cloned_into_untethered_plasmid
gctagcgccaccatgtacccctatgatgtacctgattatgcttctggcggcagcagcggcggctcaagcggaagtgaaacacctggaacttccgaaagcgctacgcctgaatcttctggtggatcttctggcggatcttccgcatgccctctgagcgaggaacacaacgtcctgctggcatgtataccacacgatctctggtctcaacataaaacagacgtcggcctggtgcgttccgcgcagccagtgcatataaaggttaaaactggtattatgttaccgtacaagcgtcaatatcctttgaagccacaccaaactgaaggaatcggacccaccataaagggcctcgttgccgccggcgtcctgaaaacaaccaaatccccctgcaatacacctatcttccctattaagaaaatcaactcaggtgactaccggctcgttcatgacctgagagccattaattcaatagtcgacgccgagacccctgtcgttcccgacccccatactttacttagcaacatccctcacgacgcttgttggtatacagtgatagatctgtgtagcgccttcttcagcgtacccctgcatcctgactctcagtacctctttgccttcacgtataaaggccaacaatatacatataccagattaccgcaaggctacgtggaatcaccctctgttttcaaccgcgttctggccaatgaccttcaacacctggacgtcacctctaccgttctccaatacgtggacgacctgctggtttgcagcaacacccaagagcaatgtactcaggactcactgaccgtattaaaggcacttgagaaaggcggccacaaggttagcaaggacaagcttcaattttgccaaccccaagtcgaatatctcggaaggcaattgtgtgggaataaacgcgcgattgcaccttcccaaattgaagccgtcagcaaagcacctaaacctctcaccgtcagccatatgctgtcttttctgggcatgacaggcttttccagaccgtggatctgtgattatgctatcaagacggccccactcagaggccttattcgggcggccggccaaaataacgggagcgcggtccttcactggacaactgaggctgagggtgcatttcaggccctcaagcaagatctccaaacggcacccgcgttaggtaatcctaactacgctaatatgttccatctctatgtagcggagaagagcgggtatgcttgcgcggtattaatgcaagacacaccaactggcaaacagcccctcgcttactattcaactaaactggacaatatcgagatgggtctgcccccttgctatcaagggctggcagcagctgcatttgcctttcaaaaggcctctgcaattacaatgggtcatcctacgaccctgtatactagccaccaattacatgcccttatcacgagccctcgtttcgttttgactcaagccaggaagactggatatgaagtaattttagcagcccctgagttgaatattcaaagatgtgccaccattaaccctgcaacccggatggtaatcccattggaaggcacccctcacgattgcatacggtctactgatgaatttcttcgaccacgtcaagaccttcataatcagcccattccggcggagctcactctgtttgtggatggctcctgcttcagagataataccggaaaccatgccggatacgcaattgtacaacttcaccccgatgatacttttacagaggtgcaaacgatcaaattagctcaaccatgtagcgcccagctggctgagataaaagctctgacagctgcctgccaactcgccgccgggaagaccctgaacgtgtataccgattcccaatacgcgtatgcagtgtgtcatatccatggcgtcatctggaaacagaggggatttctgagagccgatggatctcctgtgacacatggagaagccattagcgccctgctcgacgcaatccatcatcctaaagctttagctattatcaaatgtgctgctcaccaaaagatcgattctttaattgccaagggcaataatctggctgacgaggcggcgaagcgcgctgcaacttctacgtgtattggacctaggcctaagaagaaaagaaaggtgggtggttctcctaagaaaaagagaaaggtctgagaattc

SEQ ID NO: 14 - DNA, 2163 bp, synthetic construct
  source 1..2163: mol_type = other DNA; note = MG151-94_cloned_into_untethered_plasmid
gctagcgccaccatgtacccctatgatgtacctgattatgcttctggcggcagcagcggcggctcaagcggaagtgaaacacctggaacttccgaaagcgctacgcctgaatcttctggtggatcttctggcggatcttccgcatgctgcctctccctcgaggaacaagagaccttatttgcttccgtgccagacagtatttgggcaaaagatgactatgactttggcacactttcaacggccccgcctttggttgttcacgcgcgtacaatttattacccttccagggcccaataccctttgtcaaaggaagccgaacagggtattgagcctgtctttactagtctgctcaatcggggagccatcgtaccatgccctagctcccctgtcaatactcccattctccctattaagaaaccagacggaacctatagattcgttcaagacctgcggatcgtcaatgacgctattcactcaagacatccaattgttccaaacccctgtactattctctccagtctcccggcaacggctacgtggtttacggtcatcgacataaagaatgcatatttctccatcaaagtagaccccgccagtcaattttggttttcctttacctttaagaacgaaaggttcacgtgggcacgactcccaatgggatattccgaatctccctctgtatacaacgaagctatggtggcctgtttgagaaactttacttctcctgctgggtctactgtgatatcatatgtggatgacatattgatcggctccccatccaaagaggcctgcaagatcgacactgtagcattgctcacgtatcttgcttcagttgggcttaaggtgtcaaagcacaaacttcagctgtgccaagagaaggtgaaatatcttggccacatcttgtccccgggtaatcgagctttggatgccacacggatcacggcaattacagcttgtccccggccacggacaaagcaacaagtcctgcggtttcttgggatgacgggctactgtagagcctggatcctcaattattccgagatagcccagcctcttcaactttgcgccaccgcctgcaagaacctgactgacgtggtcacatggactgacgattgcgaaacagcttttagaaagctgaaacaagcgcttgcgagcgctcctgctttgggcttacccaattacgacttggacttccatttgttcgtgtgtgaaaagggcgggtacatgtctggagtgctttgtcaactccatggtggcaaacataggccagtggcttatctgtcaaaacgccttgatcccgtcgctcgtgggtgggtcccgtgccttaaatctgtagcggctgcctcatctgccgttctggcatgtgccgatttagtgctgctccatcctctcacagtccatgtcccccacgacgtgcacgctttactcatgcaagccaagaccacccatctcaccacagctcgcttactctcttaccagcatgtattgctcgctttgagtcatgtgaagcttgtccgctgttcccttctcaatccatccacacttcttcctacagaagaagatggagaatctcacgactgttgcgatgtcatcacgatctgcacaaaaccacgccctgatatatccgaagagccactctcaaatccagacttactcttctacgtggatggcagctgtcttcgattagactcaggcgaagtcgggtctggatatgctgtggtgaatcatatcagggtagttgaatcatatagtctgcattccagcttttccgcccagtccgccgaactggttgctcttattagggcttgtatactggcatccggcaaaagcgtatgcatctatacagattcccaatactcttgggctgtcgttcacgatcacggagccatatggaaggaaaggggctttctgaccgccgctggaaagcctatccaacataaagaccttattgaactccttctcaaagcaatccaacttcccactgctgtcgccgttgtcaaatgcgccgcccataccaagaacaatgacgaagtttcactggggaatgctagagcggatgccgctgctaagtctgctgcgaaaggcggggtgcggaaccctaggcctaagaagaaaagaaaggtgggtggttctcctaagaaaaagagaaaggtctgagaattc

SEQ ID NO: 15 - DNA, 2172 bp, synthetic construct
  source 1..2172: mol_type = other DNA; note = MG151-95_cloned_into_untethered_plasmid
gctagcgccaccatgtacccctatgatgtacctgattatgcttctggcggcagcagcggcggctcaagcggaagtgaaacacctggaacttccgaaagcgctacgcctgaatcttctggtggatcttctggcggatcttccgcatgctttaattctgatttgggcactgacattttaacccaggtgccggatcaactctggagccgccatgaaactgatgtagggctcgcggtgtcagctagtccagttgtcgtcaaactgaagccaggcgcagtgttgccttggcgcccacaatataagctgaaccctgccgacgaggaaggtatagctaatttaattgatggttttagcaaggcaggagtacttgttgagatttcatctccatgtaatacccctatccttgccgtgcttaaggcagacaaatccaaatacagactggtccatgatttgcgcgcaatcaacgccattttggaagaagtcgcagctgattttgcaaatccacatactcttctcaatgcaattcccacaaaggccaaattctttacagtcattgatctttgttcagccttcttctccatccctctcgcggaagagtctcgctatctcttcagttttacgttccgaggaagacaatactcttacgcccgaatgcctcaaggactgacatcctcacccgcttggtttgatcgagtggtgtcccaagaccttcaggagcttgacttgtctggtgtcatcatccgttacgtcgacgacgttttggtttgttcagatactatcgaggactgtcaacgcgattcaatcaaagtgttacaaaggttggccgaatgtggacataaagctagtaggaccaagctgcaattttgtcaaccacaagtcgaatttctgggtagggtaatcagtcatggcaccattgccctgagccctgaccatctcaaggggatatccagagcgccacgccctcaaacttgcgcccaattgaccacttttcttggaatgacggggtttagtgctgaatggctcgaagattatgccgttaaaacagccccgcttagggacctgctcaaatcttctgaagataaaacactgaagaaaagcctggaatggaccaccgaagcgcttatggcttttgatgtcctgaaacaagaacttcaaagcgccccagctttgaagatgcccgattacgacaaaaccttccacctttacgtatcaaacaggtgtaacatgtatgctgcagctgttcttacacaggattcctgcagcggcggaaggaagcaacctatcgcatattattccgccagacttgacgatgtggctcgagggtggcccccgtgttatcaaggcctcgcagcagttcacatggcctatgagaaagcgagcgctataacaaaatcctatccggtggtcatttacactcatcataaaatcacagaactgatcaaccacagcaagttagtgctgacaaccgcacgctgtctgcaataccttcctctgttaacttatcctgacgtaaccattaaacgctgtgaaactactaaccctgccaacatgttgcccttcgagtttgaaggagaaacacacgagtgtgtggccgaaacaacacggtataccaaattacggcccgatctcgaatctgaaccattagacgacgctcaagttatatattttgtggatggctcttgcttcagggatcacatgggcacacatgcagggtatgccgttgtccaacataaagaaggcacattcgtcaccgttaaagcagaaaagtgtctccagccgtgctccgcgcagctcgccgaactgtacggtttaaccgccgcatgtgaattggcgaagaatctgagcgccaatatctatactgactccgcttatgcccacggggtgtgccacttgttcggggccgtctggaagctgcggggatttcaaaagtctgatggcaaacctgtccggcacgggaaacagataatgaagctgattagcgccatgatgttgcctcacaggcttgctattatcaagtgtcctgcccatcagaaagacaatagctctaccaccatgggtaacaatgccgccgatgaagccgcaaaatgtgcgagcggctgtaaagtggcccctaggcctaagaagaaaagaaaggtgggtggttctcctaagaaaaagagaaaggtctgagaattc

SEQ ID NO: 16 - DNA, 2148 bp, synthetic construct
  source 1..2148: mol_type = other DNA; note = MG151-96_cloned_into_untethered_plasmid
gctagcgccaccatgtacccctatgatgtacctgattatgcttctggcggcagcagcggcggctcaagcggaagtgaaacacctggaacttccgaaagcgctacgcctgaatcttctggtggatcttctggcggatcttccgcatgcgccgctttaccagaacttactgatgttgacccccggttatgggcggagcataaagacgatgcagggttcatagatgtgcccccttatgtggctaacctgctgaaagatacacctgtctactgtaaacaatatcctttgtctaaagaaaaggaagacgggattcgccctgtgattaagcaacttttggcccaagggattcttattcacacacatagcccatacaacacacccatcaatcctataaagaaagccaatgggagctggcgattgacacaggatctgactaaaattaatgaactcatcaagccgttagcgcccattgtcccagacgtgcacacaatcctcaatagcattccggcttcccatgcatactttacggtgatcgatatttgcagcgcattctttagcgtccctgttgaccccgtgacgcagcccttgtttgctttcaccttcgaccacgctcaattaacgtggacgcggctgccccaaggattctctgattcccctgcagtgtttagcgcccttgtccatgcaactctgatggatgcgaagttaccgcctgacacctgtttgctgcaatacgccgatgatattctcgtcacgggtgcatccgaagacctgtgcacagccgcgtcaactatagtctgcaacatccttgcagaagccggattcaaagcgtctaaggacaagatccaatgggtcaaacggaaagttgaatacctgggccatgagctgtctcaagggacagttcgactctccgcggataggattaaggcgatcgcgacatataaacacccttccacgaagaagcaaatgcaaagctttcttggactcgtgaattactgtagaagttgggtccccaattgctcaatgtatgacaaaatactgcgagctgctacacttcaggattccgacgagatcacttggacggctgaaatggatcaagctttcacgtatctgaagactagcttaatccgtccacccgcattaggtttgccagtctacagccaagagtttcacttgtacgttcatgaagacggcgggactgccgccgcaatattggcacaagagcatggtggtaatttcagacccgttgcctatttaagcaaaacattggatagcgtggccaaaggtctcccagcatgtttgcgagctgttgccgccgccgcaatcatggtccaggacgcagagcgaatagttttatcccaccctctcgtagtccacacgaatcaccaagtgggagtgattatgaggaatatttctacacaacacatgacggctcagagacgatctggctacgaggccattcttctcgccaccgccaatttgacactgaaacccacatcagttgtccactcaccgactctttgtcttcacaaactcctcactcaaggggattttgaggacgatgaccacgattgtctcgcacgaatacagattagcaccgcctgccgaccagacgtatcaacaagcgtcttagaggaaggaaaccattggtacgttgacggatcttgctttaaacccaatgataacgaatatctttgcggatacagcatagttgagcttccggatagaataattgaggcatattctctgccctataaatcagcgcaggtagccgaactcatcgcactgactagggcttgtcaacttgccaagggccaatgtatcaatatatatactgacagtaaatacgcccatgggatcgtgcatgattttgctaaactctgggaagaacgagattttaagacgagtgaggggaaacctatctcccaccacagtgtcgtggccgagcttatccatgctgcccaactcccctcaaaactctccgtcatcaaagtagccggacatgtcgcaggggagtctgaagaggcaaaggggaaccgacttgcagacgaagtagccaagtgggccgctaaggacgttatcctcagccctaggcctaagaagaaaagaaaggtgggtggttctcctaagaaaaagagaaaggtctgagaattc

SEQ ID NO: 17 - DNA, 2166 bp, synthetic construct
  source 1..2166: mol_type = other DNA; note = MG151-97_cloned_into_untethered_plasmid
gctagcgccaccatgtacccctatgatgtacctgattatgcttctggcggcagcagcggcggctcaagcggaagtgaaacacctggaacttccgaaagcgctacgcctgaatcttctggtggatcttctggcggatcttccgcatgcaacaccgaccaccctgccctgtcacacattctggccggactgccagatacactttggtctcaaggcagtgctgacgtgggcctggtgcattgtccccctatttacattccacttaaaccaggctaccaaccaatatggaagtatcaatatccactgaacaaggagaaaatagaggggatttccggcacaataaaagggctgctggaagctggtgtcttgcgggagacggagtcattgtggaacacaccgattctgcctactccgaaacccgggaagagagattacagactcgtccacgacctgcgaccaattaaccaggctacagcaaccaccacatggtctacaccgaacccgtatacaatgctggccgcactctcccctacccacaactggttcagttgcgtcgacatctctaatgctttctttagttgcccgcttcatcccgactctcaagacatgttcgcttttacatacgagggacaacaatacacttatacccgtctcccccaaggattcacagagagcccagccctcttcaacaaaatcctgcgcgatcaattacaatctttgccaattccccaagatgtagtcttgttacaatttgtagacgacatatgtctggcggccgagagcgaagcctcaattatccacgccacgaaaatattgctcgaaagacttttcgacctcggatataagttatccaaggagaaacttcagcttgggcggcggcgagtgaccttcttagggagagtcgtcgcggcagggtgtacttcaataacacctagtcatcgcacagacatccttagtcaccctaagcccaccacggtaaagggaatgatggctttcttaggactgacgggctacagtcggcaatatattcccgattatgccgcccttacagcgccccttcgcctgctcattacgactgccggacatgcaaacttaaaggcaccccttgtttggacgacagacgccgatcaagcctttataactgtcaagcagttactctctgcggccactgtgctcgcacccccggactatacgcagccgtttcatctcgacgtgtctgagaaggaaggattcgtgaatgccgcgctgtttcaaaagggtggtggcggagaaaggcacgtacttatgtactattcctctaaattagacaatattgaaattgggcatcccgtttgtactaaacacgtagctgccatcgccaaggctctcgagaaaacgagccatctcactatgtgtcaccaaacgattgtgcatacaattcatggtgtagccgctttcttaaattcatccgccttttccctgagtcatagacggactgaccgaatcaaagatctggtattgcaatcccatatcactttcacaggagaaggggtcaacatggctgagaatatgagcattggcgaagcccacaactgtgtgaaggatacggaaacccagatgagggtaacaccgacactttcctctgtgccactcagtaatcctgatctggttctgtactgcgatggatgttgctatcgtaagaactcaggcgaacttatagcttcccttgcagtggtcagcggcaaaattgggaataacctgaccacggtgaaggctgaaatcgttccccaaccagcttccgctcagaaggcggagatcgcagctctgacggaagcttgtagatatgcggaaggaaagaccgtgaacatctatacagactccgcctatgcacatcaggcaatacatgtagacattccccactggttaagaaagggattcgttacttctacgggaatgctcatcaagcacctgaaggagatgacggatctggtggaagccgttcaactccctactaaggttgccatcctgaagtgcaaagggcaccaaaagagtaatactgaaatagcaaaagggaatgaagccgctgatcatgctgctaaaactaccgcggggtactacgatcaacctaggcctaagaagaaaagaaaggtgggtggttctcctaagaaaaagagaaaggtctgagaattc

SEQ ID NO: 18 - DNA, 2127 bp, synthetic construct
  source 1..2127: mol_type = other DNA; note = MG151-98_cloned_into_untethered_plasmid
gctagcgccaccatgtacccctatgatgtacctgattatgcttctggcggcagcagcggcggctcaagcggaagtgaaacacctggaacttccgaaagcgctacgcctgaatcttctggtggatcttctggcggatcttccgcatgcgacaatattaagcaattatctgtgttgcctggactgtccgaggacccttccgcagtcggcttgcttcaggtgaaagagcagcaggtgcctattgcgactaaggcagttcatcgcagacagtataggacaaatcgggactcattattaccaattcacaaattgatccggcagctggaaagtcagggcgtcatcagcagaacccattcccccttcaacagccccatttggcctgtgaggaaggcctcaggcgaatggcgactgaccgtggactacagggggttgaatgaagtcacccctccgttaagtgcagccgtgccggatatgctggaattgcagtatgagctggaatccaaagcagctaaatggtatgctactatcgacatagccaatgcattcttttccatccctcttgccagggagtgtaggccccagttcgcctttacatggaggggcatccaatatacttggaatcgcctgcctcagggttggaagcatagtcccacaatctgccacggcctcatccaaactgtgctcgagcaggggagcgcacctgagcacctgcagtacattgacgatattgtggtgtggggcgacaccgccgaggacgtgttcaagaaaggagagcaaattatacagatcttgctgcaggccggcttcgcaatcaaacgaagcaaggtgaaggggcccgctcaggagatccagttcttaggcattaaatggcaggacggccgccgccacatcccagcagatgtcatcgataagatcacagcaatgtcaccccccattaacaaaaaagaaacgcagtcttttctgggcgtagttggattttggaggatgcacgtcccaaactactcccttattgtgtcaccattgtatcaggtgactcgtaaaaaaaatgacttcacctggggacctgaacagcagcaggcatttgagcagattaaacatgaaatcgcccgggccgtagcactgggaccggtaaggacaggccaggatgtgaaaaacatcttatacacagctgctggcgaaaaaggtcctacatggagcctgtggcagcgtacttccggtgagactagggggcgccctctcgggttctggagccgggcttaccgggggtccgaggaatgctataccccaactgaaaaagaaatactcgcagcatatgaaggtgtgcgagcggcaagtgaagtggttggaactgagacccagctcttgctggcaccccgcctgccagtgctcaactggatgtttaaggggaaaataccctccacccaccacgcgaccgacgcaacctggtctaagtggattgcactcattacacaacgcgcccggatgggcaacttctccaggccgggcatattggaggtcataatggactggccggagggaaagaaattcgagacctcccctggcgaagaggtgtcacgagccaaagaagcgcccccttacaacgagttgcccggaaacgaaaagaagtatgcattgttcactgatggaagctgtcgcattgtgggcaaatatcggagatggaaagccgcagtatggagccctgtgcgccaggtagcagaagccacagagggaaagggggagagcagccaattcgcagaggtcaaagccgtccagcttgcactcgatgttgctgaaagggaaggctggccagtgctctatctgtataccgactcttggatggtagccaatgccctgtgggggtggttacaacagtgggaacaaaacaactggcagcggcgcggaaagccgatatggtcagccgaactttggaaggacatcgctgcccgcattaagaatatggtggtaaaagtgaggcacgtggacgcacatatgccgaaatcccgagccacggaggaacaaaagaacaaccatcatgtagaccaggccgctaagatagaagtagcccctaggcctaagaagaaaagaaaggtgggtggttctcctaagaaaaagagaaaggtctgagaattc

SEQ ID NO: 19 - DNA, 2055 bp, synthetic construct
  source 1..2055: mol_type = other DNA; note = MG151-99_cloned_into_untethered_plasmid
gctagcgccaccatgtacccctatgatgtacctgattatgcttctggcggcagcagcggcggctcaagcggaagtgaaacacctggaacttccgaaagcgctacgcctgaatcttctggtggatcttctggcggatcttccgcatgccgtgccgtgcaggcaattattcgaggacatgccgagatagagcctatatgcctgcctcagccgcgcaggattaccaacacgaagcagtatcggctgcctgggggacagcaggagataacaaagactgtgcaagagctggagcgcgtcggaattattagacccgctcatagtccatataacagcccaatttggcccgtacgtaagcctgatggaacttggcggatgactgttgactatcgcgaactcaataaagtgactccaccaattcacgcagccgtgcctaatatcgcaagcctcatggatacactgagccgagaaatcgagacttatcactgtgtgctggacctggcaaatgcctttttctccatcccgatcgccaaggagtctcaagaccagtttgcctttacctgggaaggaagacagtggaccttccaggtccttccacagggctacgttcacagtccgacattttgccacaacttggtcgcctccgatttggctaactggaataagcccagtacagttaagatgtttcattacatagacgaccttatgcttacaagcgattccatcgaggctcttgagaagacagttccctcactgatcacttacttgcaggaaaaagggtgggcaattaatccccagaaggtccaaggacccggtctgagcgttaagttcctgggtgttgtgtggagtggcaagacaaaagtgctccccagcgccatcatcgacaaaattcaggcattccccgtcccaacgaagccaaaacagctccaggagtttctgggtatcctcggctattggaggtcttttattccccacctcgcacagcttcttaaacccttgtatcggctcactaagaaaggccaggtgtgggattggggacgcacagagcaagaggccttccagcaagccaagattgctgtgaagcaagctcaggcacttgggatctttgaccccacactcccagccgagctggatgtgcatgtaacacaggagggcttcgggtggggcctctggcagcggcaaggttccgtgcgaatccctatcggcttctggtctcaaatctggcatggggccgaggagcgctactccatggtcgaaaagcagctgctcgccacatactcagccctccaggctgtggagcccattacacagactgctgaagtaattgttaaaactacacttcctatccagggttgggtgaaagacttgacacacattcctaagaccggcgttgctcagagccaaaccgtggcaaggtgggtagcatatctctctcaacgttcccgcctcagttccagccctctgaaggaagagctccagaagattttgggacctgtaacataccatagcgagactccagaggagatcgtcgtgacctgcccagaaaagtcacctgttcaggaaggcaaataccccattcctgaggatgcttggtacactgacggaagttctcgggggaatcccagcagatggagggcagtggcttatcacccatccactgagacaatttggtttgaagaaggggacggacagtcatctcagtgggccgagctgcgagccgtatggatggtgatcacacaggagccagggaactctgctcttaacatttgtactgactcatgggcagtttacagggggctgaccctctggatcgcacagtgggctacacaggattggactatccatgcaaggcctatttggggtaaggacatgtgggtggacatctggaacgtagtccgccataggacggtgagggcttatcacgtgagcggacaccaacctctgcagagccctggcaatgatgaggccgacaccctggccagggtcaggtggctgcctaggcctaagaagaaaagaaaggtgggtggttctcctaagaaaaagagaaaggtctgagaattc

SEQ ID NO: 20 - DNA, 2175 bp, synthetic construct
  source 1..2175: mol_type = other DNA; note = MG151-100_cloned_into_untethered_plasmid
gctagcgccaccatgtacccctatgatgtacctgattatgcttctggcggcagcagcggcggctcaagcggaagtgaaacacctggaacttccgaaagcgctacgcctgaatcttctggtggatcttctggcggatcttccgcatgccctctgaggcaggaggatgagaagaaaattaaccctgaggtttggtacaatccaggatctgttgggcagttgaagatagccccttttacagtcaaaatcaaaaacccagagatccccgtaaggatcaaacagtatcctataagtcccgaaggtaagcgcggattgaagcccgagatcgacaggttattgagccgggggctgctggagccatgcatgagtccatacaacaccccaattttgcctgtcaagaaggccgatggcagttacagattggtgcatgatctccgggagattaacaagcgaacaattgctcggtttcctgtcgtcgcgaatccttacactctgctctccaagttaggtccagataacgtgtggtacagtgtcattgacctgaaggatgctttctgggcctgtcccttggatgagtcctcaagagactatttcgcattcgagtgggaggacccagaaacaggtcgccgacagcaactgaggtggacagcacttccacagggattcacagaaagtccaaacctgtttggacaggcccttgaacaaattttaaaagattaccagactaagtcaggggtgaccttaacccaatacgtagatgacttactgctggcaggaaaggacgaagaggatgtacgaaaggagtctattcgtctgttgaatttcttgggactgaagggcctgaaggtgtccaagaccaagctgcagtttgttgaggaagaagttaaatatctgggtcactatctgaagaaaggagaaaaaaggatcgacccagaaagaatccaggccatcctgtccctcccaactccccagaacaaaaggcagatccggcagatactgggtttgactggttactgccggcaatggattgagaattactcaaacaaggcccgcttcctttatcaaaagcttacacaggaaggactgatgaaatggacccaaagggacacagagaaattacaggagctcaaggagtccctcgttcatgcccctgtcctgagcctcccagacctgaaaaggcctttttttctgttcgtgaacgttgccgaaggtattgcatttggagttttgacgcaggactgggccggcaagaagaaacctgttgcgtatttaagtaagattctcgatcctgtgtccagaggatggccaacttgtctgcagatcctggccggatgcgctgtgctggttgaagaaactcggaagattaccttcaactctagtttaaaggttctctcccctcataacatacggtcagttatgcagcagaaggcggataagtggatttctgatgcccggcttttgaagtacgaaggcatccttttggaagccccagatttcgcgttggagacaaccaccctccaaaatccagcagccttcctctatggcgagccagagcaagagcccctggttcacgactgcattgcaacgatcgaagaacagacgaaaatccgaccagacttggaagaagaagaactggatgaaggcgagaagctcttcgttgacgggtcttccaaagtaattgagggtaaaagaaaatcaggctatgctatcatcgggggaaccgatcttcaggtgatcgagagtggggctctcgacaaatcctggtctgcacaggcttgtgaactttacgctatcctgcgggcacttactctccttaaaggtaaggaagggacaatttataccgactccaagtacgggttcggcgtcgtccatactttcggcaagctgtgggaagaacgcggcctgattaatagtcagggcaaagatctggtgcaccaaaagttaattattgaagtgctcagagctcttcgagggcctaagaaagtcgccgtcgtgcatcttaaagggcatcagagaggattggacttcaggtcacggggcaacaatgccgcagatcaggaggccaaacgggcagcgatgagagagatggtattaagggagaaacaggggaaccctaggcctaagaagaaaagaaaggtgggtggttctcctaagaaaaagagaaaggtctgagaattc

SEQ ID NO: 21 - DNA, 2205 bp, synthetic construct
  source 1..2205: mol_type = other DNA; note = MG151-101_cloned_into_untethered_plasmid
gctagcgccaccatgtacccctatgatgtacctgattatgcttctggcggcagcagcggcggctcaagcggaagtgaaacacctggaacttccgaaagcgctacgcctgaatcttctggtggatcttctggcggatcttccgcatgccctctcattttgtatttgtctactccatccactcccactccagaccaactcccttttgttaatcctcaggtctgggatacttcagaaccggtcgtcgccagccaccatcctcccgtgaaaatcaagctcaaagatggatctaagttcccctcaagaccacagttccctattagcctcctgcacagacttggcctcaaacccataatcgaacggttgaaaaggcagggtctgctgatccctataagcagtccatgtaattcaccaattctgcccgtgaggaagccaagcggggcttatcgcctcgtgcaggacttgcgcctgattaatgaggccatcgtcccgctccaccctgtggtccccaacccttatactttacttagtcacattcccccgaatacaacacattttaccgtgcttgatctgaaggatgccttctttacaatcccattacaccccgattcatatttcctgtttgcattcacctgggaggaccctgacacacatacctcaggtcaactgacctggacagtactcccccagggatttcgggatagtccacacatatttggacaagctttggcagccgatttgcagcagtgtttactgaaggcttcaaccctgcttcaatacgtagacgatttactgttgtgctcccctgctttgaccatctcacaagacgatacatcctctctgcttaatttcttgggctcaaaaggctatcgcgtcacacctagcaaagcacaactttgcactccctccgtgacctatctgggtatccatctcactccgacctctaaaagcctgactggcgaccggatccgcttattgcgggagctccaacccccacagaccgcagacgagatcttgagcttcctgggtttggcaggattttttaggcactggatccccaacttctcaattcttgctagacccttatatcaagctgctaaggacactcctcaaggacctctttcagacccaagctctgtgcgaagacttttcagtaaattgcgggattgtttgacggctgggccgattctgactttacctgatccatcaaagcccttccatctctatacagacgagaggagcggctccgcaacaggactcttggcgcaacctgttggcccgacctacaggattatcgcttacttaagcaaacaactggacggtaccgccagagggtggcaaccttgtttgcgggccctcgctgccgcggcgtctctgacaaaagaagcactcaaactgaccttggggcagccactggtggtgtatagcccccatcgattacgggacttacttagtcatcggagcctggcacacctgacaccttcacgattgcaactgtttcacttactttttatcgaaaatccccagatttccttgtccacttcacctcgcctgaatcctgcaactttactccccacaccatccccgactagtgagcctacacactcctgcccgcagctgttggaggacttgacacctcctcatccaggccttagcgatcaacctctgagcaatcctgatcgcatcctcttcgtggacggcagtagtttcctggccgccgacggaaggagacatgccgcttacgccgtagtcacacctgagaccgtggtggagaccgttcccctgccaatcggtactacaagtcaaaaagcagagctcatagctctcacgcgggccctccatctttcaaaaggccagagagtgacaatctacacagacagcaaatacgcctacttgatagctcatacccattctgtgttgtggcaggaacggggcttcttaacaactaagggcacaccgatcgtgaatggacccctgatcgccaaactgctcgaagccttaagtctgcccactgaggtcgccatcgtacactgtcgcggtcatcagacatcaaaagacatggtgtccattgggaataacaaggccgacagtgtcgcaagaaagactgcgctctctaaccctgtcagtccaattttattcttacctaggcctaagaagaaaagaaaggtgggtggttctcctaagaaaaagagaaaggtctgagaattc

SEQ ID NO: 22 - DNA, 2232 bp, synthetic construct
  source 1..2232: mol_type = other DNA; note = MG151-102_cloned_into_untethered_plasmid
gctagcgccaccatgtacccctatgatgtacctgattatgcttctggcggcagcagcggcggctcaagcggaagtgaaacacctggaacttccgaaagcgctacgcctgaatcttctggtggatcttctggcggatcttccgcatgcacatgccccattagcgaagaatacctgctcctggaaaaaccggagcagaaggcctctccccttattgaaaagtggaagaagaccatacctaccgtttgggctgaaacaaacccgcctggcctggctatccaacaggcaccactggtcatacagctcactgccaccgccacccctattcgcgtgcggcagtaccctatatctcagcacgccagggaggggattgcaaaacacttgaatagacttcgggaggccgggatcctcgtaccatgtcattcaccatggaacaccccactgctccctgttcctaaacccggtacactggaatacagacccgtccaggatcttagagaagttaataaaagagtggaaacaatccatccgaccgtgccaaatccttacacgctgttgagcaaactctctcctgagcaccacttgtatagcgtgcttgaccttaaggatgaatttttcgcattgccgatagcgaaggtgtcacagccaatattcgctttcgagtggacagaccccgggggtacctataatggccaactcacttggacaaggttgcctcagggcttcaaaaattcccctacactttttaacgatgcattacagcgtgacctgataccctatcgtgagagtcatcctgacgtcacactgttacagtatgtggacgacctcttgctggcagcagatagtttcgaaagctgcgctaaggcgaccgaagatctgcttcggaaactgaacgcactcggctacaaggtttctgccaaaaaggctcaaatttgtctggatagtgtcacatatctcggatacagactctacgaaggaaaacgatccttaggacctgagcgcatccaagctatcttaaacatcccaaagccaacaacgaagcgccagattcgcgaatttttgggttcagccggttattgtcggttgtggattcccggcttcgccgagatggctaaaccgctgcatacagccactcggggggaaggcgctgagatggtgtggggcgagcaggaggatagggctttcgagcagatcaaacacgcactcacccaagctcccgcgctcgcattacctgatataaccaaacctttccagctgttcgctcatgaggtccggggtattgccaaaggggtgcttacacagacactggggccttggaaacgtcctgtggcttaccttagcaaaagattggattccattgccgccggctggccgggatgcctgagggctgtggctgccaccgctattctggtaaaggaggcttccaaattgacactcggtcaagatctgcaggtgatcgggccacatgctgtggcctccctcttacatagcccaccggacagatggatcagcaatgccagaataatccagtatcaagtactccttcttgacccaccacatataacctttctgcgtaccgaagcactgaaccccgccacactccttccagatgataattccgaagccccgctccacaactgccttgagacagtgtccaacttgacaggcctgagggaagatctgcgcgaccaacccctgccaaaggtggatatagaattgttcaccgacggtagttcctttattaaaaacggaatacgctatgctggagcagccgtggtgacacaagaccaagtgatttgggctcaggccctggagcgcaacacgagcgctcagaaagcagagctgattgctcttgcccaggccctcacttgggccaagggtaaaaccgttaatatcttcactgactcaaggtatgccttcgcaactgcccatgtccacggcgcattatacaaagagagagggctgttgacaagcgagggtaaggagattaagaacaagcgagagattcttgccttattgaaagcactgtggttgccaaagaaagtggcgattgtacactgcaaatcccatcagaaaactaattctcctcaggccagaggcaatgcattcgccgacgcaacagccaaggcgactgctgaaggcgaggtacttcccatcgagatccttccccctaggcctaagaagaaaagaaaggtgggtggttctcctaagaaaaagagaaaggtctgagaattc

SEQ ID NO: 23 - DNA, 2232 bp, synthetic construct
  source 1..2232: mol_type = other DNA; note = MG151-103_cloned_into_untethered_plasmid
gctagcgccaccatgtacccctatgatgtacctgattatgcttctggcggcagcagcggcggctcaagcggaagtgaaacacctggaacttccgaaagcgctacgcctgaatcttctggtggatcttctggcggatcttccgcatgcactatgccagcttctgaagaatatagactgtatgaggacacaaggcaggcaaatgatcttgggcttctggagatatggaagcaagaaattcctaaattctgggcagaaaccaatcctcccggccttgccaagcatgtcacccccatcttggttcagctgacttcttccgcgacacccgcccggatgcgccaatatcccatgtctcgcgaggcccagcagggaattaggatacacattcaaagactcaaaaaggcggggatcctggtgccctgcaagagtgcctggaatacacctcttcttcctgtgcgaaagccaggaactaatgactacagacctgttcaagacctgcgcgaagttaacaagagagtggagacagttcatcccacagtacccaatccctacaccctccttagtttactgcctcccgagaggacgtggtactccatcttagatcttaaagacgcttttttcagcattccactggcacctcagtcccaaccaatattcgcatttgagtggactgatcccgaagaaggcgaaactgggcaattgacatggactaggctcccccagggcttcaagaatagccccacactgtttgacgaagcactgtccaaggatctctctagtttccgggggaagcacccgggctgttccttgttgcaatatgtggatgatctcctgattgctgcaagttctcagcgggactgtgaggaggctacccacgatttactgaaagtgctgggcgctctcggctatagagtgagcgctaagaaggcacagctgtgtgcccaagaggtgacgtatctggggtatcagatcaaggaaggtcagcgggcactgtcacaggctcgtattcagactgttttgaaaatccccaccccttccactaagaggcaggtccgtgagttccttggcgccgtgggctactgcaggctttggattccaggctttacagagctggctaaacctctgtatgtcgccactggaggatctgatgcatcactgaaatggaccgaaatggaagagaaagccttccaggccctgaagaccgccctggtgagtgcacccgctctgagcctgccagatctcaacaagcctttccagctttttgtggcagaaagcgtgggtgtggccaaaggcgtgctcactcagactctgggtccttggaagaagcctgttgcttatctctctaagagactggatcccgtcgctgccggatggcctggctgcctgcggacggttgcagctgcagcgctgttggtgaaagaggccacaaaacttacattcgggcagactctcgagatagtaacctcccacaacttagcatcattgctctattcccctcccgacaggtggatgacaaatgcacgtatcactcattatcaagttctgctgctggatccacccagggtaactttcaaacagaccgcggccctcaaccctgccaccctgctgcccaatcccgaggatgaagcaactcatgactgcggtgagatcttggaggcactcacttcactcagagctgacctgactgacgttcctcttcctgatgccttagtaactctgtacacagacggttccagtttcgtaaaggacggggtgagatatgtgggcgcagccgtggtgactaatcaggaggttctttgggccgcctcactgcctcaaggtacatcagcccaaaaggccgagctgatcgctctcacccaggccctgaaatggggagcagggaagaagatcaatgtatacactgatagtcggtacgccttcgccaccgtacacgtccacggtgctctctatcaggaacgggggctgctgactgctggtggacaagcaattaagcacgcccccgaaatcttggccctgctggcggccatttgggagccggaaaaggttgccgtgattcattgtaaaggccagcagagagatgatagcgatgtggctcaggggaatcgattcgcagatgacattgctcgtaaggctgcaaaacggctcgtcggaacccaggcccagctgatccctaggcctaagaagaaaagaaaggtgggtggttctcctaagaaaaagagaaaggtctgagaattc

SEQ ID NO: 24 - DNA, 2229 bp, synthetic construct
  source 1..2229: mol_type = other DNA; note = MG151-104_cloned_into_untethered_plasmid
gctagcgccaccatgtacccctatgatgtacctgattatgcttctggcggcagcagcggcggctcaagcggaagtgaaacacctggaacttccgaaagcgctacgcctgaatcttctggtggatcttctggcggatcttccgcatgcacactgactctcgaagacgaataccggctgcaccaacaaccacagtcccccgataagaacatcaaggactgggtgcagcgcttccccgacgcctgggcggagaccgggggcatcggcttggccaaacaccgaccagcactgtatatcgaaaccaagcctggcgttaatccagtgcgagttaaacagtacccaatgacccgggaagctaggacaggcattacccctcacattcgacggctgctgaatcagggaatactgcgtccatgccggagtgcctggaacacgccgcttctgccgatacggaagcctaattctaacgaatactgccccgtacaggaccttagagaagtcaataagcgggtcgcagacattcatccaaccgtcccaaacccatatacactgttatcagccctgccaccctacagacagtggtataccgtactggatctgaaagacgcattcttttccctgtctctcgctcccaagagtcaagaactttttgcattcgagtggaccgacatcgatatgggaatcaatggacagctcacctggactaggctgccacaggggtttaaaaactcacccacactgttcgacgaagcgctgcacgaggatctgggagagttcagaaaaaaccatcctaacctgaccctgttgcaatacgttgatgatctgctggtggctgcagagaactgggatgaatgcatccgaggcaccgagaacctcctgcagacacttgggaacctgggctacagagcatccgctaaaaaggcgcaaatttgcaggcccgaggtcacatatctgggctatctcttaaaggggggcaaacggtggctgacacaggcccgaaaggaaactgtactgcggattcctaagccacaatcacctagacaggtgagagagttcctcggctccgctgggttctgcagattatggatacctggctttgcagaactggcaaagccactgtacgaggccaccaaggacaaacagcccttcaattggactattgaggctgataaagcatttcagcagattaaggacgcactcctgtctgcacccgccttggggctgcccgatgtgatcaagccattttttctgtacattgatgaatctaaaggcattgccaaaggtgtgctgacccaatatctcgggccctggcggcggccagtggcctacctgagtaaaaaactggatcccgtggccgcagggtggcccccgtgcctgcgaatgatagcagccacagcactgatggtcaaagacgcagataaactgacaatgggccaggagctccatgtgatcacacctcacgccatcgaaggcatattgcggcaaccccccgatcggtggctttctaacgcaagattgacccattaccaatcattgctgttgaatcctcctcgaatcatcttccaggcgccttctgcgctgaaccccgccacattactgcctgaccctgatctcgacacaccaattcatgactgcagtgaagtcctcgcacaagtgcatggattgagagaagacctgcaggatcatcccttactcgacgcagacgccgtccagtttaccgatggatccagttttctccaccaaggccagaggtatgcaggtgccgccgtggtcacagaaactgaagtgatttgggcagagccactcccaattgggaccagcgcacagaaggccgaactcatcgcaatgacaaaggctctcaccatgggtgagggcaagaaactgactgtgtataccgactctaggtatgccttcgctacagcacacattcacggcgcaatctatcgggaaagagggatgcttactgctgagggaaagagtattaagaacaaagaagaaatcgtttctcttattgacgccctttggctccctaagaaacttgccatcgtccactgtcccgggcaccagaagcccaccgatccagtgagccgaggcaattgcttggcagataagatggcgcgggaaatcgccctgcagcgagatctgattatggttgcacagctgccacctaggcctaagaagaaaagaaaggtgggtggttctcctaagaaaaagagaaaggtctgagaattc

SEQ ID NO: 25 - DNA, 2253 bp, synthetic construct
  source 1..2253: mol_type = other DNA; note = MG151-105_cloned_into_untethered_plasmid
gctagcgccaccatgtacccctatgatgtacctgattatgcttctggcggcagcagcggcggctcaagcggaagtgaaacacctggaacttccgaaagcgctacgcctgaatcttctggtggatcttctggcggatcttccgcatgctccctgagtttggcagatgaacatcgcctgtttgagtcccagcaggagcctggaggcgatatgacccactgggttaaaagattccctacggcttgggctgagacggctgggacgggattagccaagcaccttcccccggttgtgatacagctgaaggcgtcagcgctgccaatcagggtcaaacagtacccgatgcctgaggaggcgcgaagaggcattgctccacacatacaccgactcatcaaagaaggcgtgctgagaccatgccagagcgcctggaatacaccactcctgccagtgaggaaaccggggtccggagactatcgctctgtgcaggacttgagaaaagtaaatgaaaggactgaggacatccatccgacggtgccaaacccgtacacgttgctgtcacacctgccgccctcccaggtgtggtacactaccctggacctgaaggacgccttcttcagtattccactgtctgaaatcagtcagcccctcttcgcctttgaatggcaggaagacgggggtcaaagcggtcagctcacatggacacgattacctcaaggctttaaaaattctcccactttgtttaacgaggcgctcagtcaggacctggaacccttccgtagatctcacccacgggttactctcctccagtacgttgatgatcttttgctcgccgccgagactagagaagaatgtatcaaggccacggaacatcttttaaccgagctgggcgaactgggataccgggcatctgcgaagaaaactcatatatgcaaacgctcagttacctatctgggctatcggatcgctgatggggccagatggctgacagatgccatgaagcagactatactggctataccaagtcccacctccactagaggagttagggaatttttgggcagcgccggattttgtagactgtggatcccagggttcgcagaaattgccaggcccctctacgaggcaacaaaggaagccccggactggagttggggcgaaagggagcagcaggccttcgaccaattgaaggacgctctgctgcaggctcccgccctcgccttacctgatccgacacgccccttcaccctttttgtagacgaaaaaaagggggtggccaaaggggttctcacacagcagttggggccttggaaaaggccagtggcatactttagtaaaaagctggacgcagtggccgcaggatggcctccttgtcttcgaatcatcgctgcaatcgcagtcctggtgagggaagctgacaaactgacctttggccaagctctgtgggtgacggctcctcaccccgtggaggggattctcaaacagccaccgggaaaatggatgactaatgccagactcacccactatcagggcttacttctggatagcccccggattacctttactgatcccgtgattctcaatcccgcaactcttttgcccaatcccgagcttcagacccccgttcacaactgtaaagagtttctgagtgaggtcacccaggtcagagcggacttgaaagatacacctttgagtggatgcaagttgaattggtacaccgatggctcctccttcttccaggatggggcgaggcgggctggagccgctgtggtagaccaagaggggaataccgtttggtcttctgccctgccgcccgggacttccgcccagaaggccgaactgatcgctctggccgaagcactggagcgtgcaaaaggtaaacgcgtgaacatatacacagactccagatacgctttcggtactatacatgtacatggggcaatttatagggagcgcggttttcgcaccgctgaagggaaacacctgaaaaaccttgctgaggtccaacgcttgctgatggcagtggagaagcctaaggctgtggcagtgatgtatgtacctggccatcagtcagcgaaaacccccgaggccgttggaaataatagggccgaccaagaggctaaacgcgtcgcgatggtgtctccaccaatggaaaccggacaacccagcacagtagccgcaatagatgttccgcctaggcctaagaagaaaagaaaggtgggtggttctcctaagaaaaagagaaaggtctgagaattc

SEQ ID NO: 26 - DNA, 2082 bp, synthetic construct
  source 1..2082: mol_type = other DNA; note = MG151-106_cloned_into_untethered_plasmid
gctagcgccaccatgtacccctatgatgtacctgattatgcttctggcggcagcagcggcggctcaagcggaagtgaaacacctggaacttccgaaagcgctacgcctgaatcttctggtggatcttctggcggatcttccgcatgccagcgttgcatctccattagggccatacagaccattctgagaggccatgcaaagcatgaacctatctgcctccctaaaccaagacgaatcacaaatgttaagcaatacaggctgcctgggggacaggacgagattacaaagacagtgcaggagctcgagcgagtcggaattatcagacccgcccacagtccatacaactccccaatttggcctgttaggaagcctgatggcacgtggagaatgacggtggactacagagagcttaacaaggtgaccccccctgtgcacgccgctgtgccaaacatcgcttccttgatggacacacttagccgggagatcaagacataccactgtgtgctggacctcgcaaacgccttcttctccattcccatctctgaagaatctcaggaccagttcgctttcacatgggaggggcggcagtggacatttcaggttctgccccaggggtatgtgcattcacccactttctgccacaatttagttgctcgggacctggcgaagtgggagaaaccgaataacgtaaacctgtaccattacatcgatgatttactgctgacctctgatagtttagaggctgtacggcaagccgcagacctgctgatcgcctacttacagaaaagaggatgggcgattaacccacaaaaggttcaaggtccaggcttatcagtaaaatttctcggcgtcatctggagtggcaagaccaaggtgcttcccagcgccgtcgtagataaggtgcaggcttttccagtgcctaccacctctaagcagcttcaggaatgcttggggattctgggatactggagatcctttatcccacacctcgcccagttactgcggcctctgtataaattgaccaaaaaaggtcagagttggaattggggcaaaattgagcaagatgcatttcaacaggccaaactcgccgtcaagcaggcccaggccctcggtatttttgatcctactttgccagctgaactcgatgtacacgtcacccaagatggcttcgggtgggggctgtggcagagacagagtagcgtgcggacacctattggtttttggtctcaggtgtggcatggtgcagaggaacgatatagcatgattgaaaaacaacttctcgctgcatactctgctctccaggcggtagaacctatcacccagaccgctgaggtgatagttaagacctccttaccaatacagggatgggtgagagacctcacacatcttcctaagacaggagttgcccaagctcagacagttgcgagatgggtggcctacctgtcacagcgctcatctctgtctagtagcccactgaaggaagaattacagaaaatcctcggcccagtgacctaccacagcgatacttccaaggaaccaatggtggcaccgccggaaaagtccccagtgcaggagggcaggtaccccattcctgaggatgcatggtacaccgatggatcaagtcggggaaatccttctaagtggagggcaatcgcttatcacccttccacagagactatctggtttgatgagggagatggccagtctagccaatgggccgaactgagggccgtctggatggtgattacaaaggagccgggtgacggcgtgcttaatatatgcaccgattcctgggctgtgtatcgcggtcttactctttggattacgcaatgggctacccaggaatggactatccacgccagacctatctggggaaaagatatgtgggtggacatctggaacacagtgaagcataggacggtgtgcgtgtatcatgtatcaggccatcagcctctgcagtcccctgggaatgatgaggcggacacactcgcccggattaggtggattgagaactctcctaggcctaagaagaaaagaaaggtgggtggttctcctaagaaaaagagaaaggtctgagaattc

SEQ ID NO: 27 - DNA, 1938 bp, synthetic construct
  source 1..1938: mol_type = other DNA; note = MG151-107_cloned_into_untethered_plasmid
gctagcgccaccatgtacccctatgatgtacctgattatgcttctggcggcagcagcggcggctcaagcggaagtgaaacacctggaacttccgaaagcgctacgcctgaatcttctggtggatcttctggcggatcttccgcatgcaactcaaaacctctcgaggtgcccacggccctgccgctgaagtggttaactgagaagccgatttggattaaacagtggccccttgccgaagataaactgcaggccttggaacaactggttcaggagcagagggacgccaatcatattgaggagagcacatccccatggaacagccccgtgtttgtcgtgaagaaaaaatcaggtaaatggagaatggtgaccgatctccgagccgtgaataaagtcattcaaccgatgggtccactgcagagcggattgccccttcctagtctgctgcccaaacgatggccactgatcatcatggatctcaaagagtgctttttcaccatacccctgcaggaaaaagatcgcgaaaaattcgccttcacagtgcctacatataacaacagccagcctagtcggtcatatcaatggacggtgcttccccagggaatgctcaatagcccaattctgtgccagtatttcgtgaataagtctttggagattatcagaaaacagttcccaaaaagtataatttatcactacatggacgacattctgttatctgactcaaataaggatacattggaaagtatgtttgaagaggtgaagaaagtgctccctagatggggactccagatcgctcccgagaaaattcagcgcgaggactccattaactatctgggctataggattggactcgagaaaatcaggacccagaaagctcaaatcaggcgggatagattgagaacactgaatgacttccaacgactcctgggggatataagtagtttacgtcctgcagtgggaatcacccccgacctgatcgttcatcttaacaagaccctcgacggagacaaggacttaaacagccccaggaagttaaccgtcgaagcagaaaaagagttgaccatgattgaagaaaagctccaggaggcgcacgtggatcgcgtgaacccaaatcttagctccatcctcgtgatcctgccttcccgcattagcccaactggtatcctgatgcagagagaggacattattttggagtggatcttcattccccacaagccctccaagaagctcaaaacgtacgtggagaaagtctcagagctcattatcaagggcaagcttcggctgcgccagcttgccggcatagaccccgctgagattatcgttccgttcaccacagaagagataaggaagctgtgggaagacaatgagccctggcaacgagcatgtgcaaatttcctcggagagatttccagcaactaccctaaatctgaccgcctcaaccttatcaaacgaacttcatggatactgcctagaattgtgagagacgcccccattaccggcgccaggacattttacaccgacgctaacaagtctgggaaagcggggtataaaagcgaagaactgtcaaaagtagaacagtccccttacaactcagttcaaaaggctgaactgtatgctatactcatggtcctgcgtgattttaaggaaccattaaatatcgtaacagactcacaatatgccgaacgggtgattctgcatattgaaaccgccgagttcatcccagatgacaccgagttaacctctctgttcatagaggttcaggatattatcagaaatcgcttgtgtccaatgtacatcacccacatcagatcccataccggcctgcctgggccgctcgctcagggaaatgctgaaatcgaccagctgctgatcggccctaggcctaagaagaaaagaaaggtgggtggttctcctaagaaaaagagaaaggtctgagaattc

SEQ ID NO: 28 - DNA, 2067 bp, synthetic construct
  source 1..2067: mol_type = other DNA; note = MG151-108_cloned_into_untethered_plasmid
gctagcgccaccatgtacccctatgatgtacctgattatgcttctggcggcagcagcggcggctcaagcggaagtgaaacacctggaacttccgaaagcgctacgcctgaatcttctggtggatcttctggcggatcttccgcatgcaataaggcacgacttaaagagatccttgaaaaaggacagtatagtcagttcaaaaatgatgttggaacaatcaaaggcatcaagccctatgaaattccgggtattaacccaggtaaagaaaagcagtatccactgggcccaggcgaggagcaaataaaaatcatagttaaagagttggaagagatcggggtcattgagcagacgaaagaccccgtatgtttgacccctattcaaggggtgctcaagcctgggacgaccgataaataccgcctggtgcacaacctcaaagcccttaacaagaggaccacaaccgaccagagaacgctgattcatgcccggaaaactctgattaatttgcctaaccacaaatttaagacaacaattgacttgtccaatgggttttggagtatcccgctcagtgaagatagcaagtatctgacaggctttcagatacagggaaaaacttatcagtggacaaggctgcctcagggatttgcaaatagcccgaatgtgtttcagagcgtgatggaagagatactcgacgacctcgatgttactgtgtacatcgacgacatttatttttctgatgaaacagaagaagcccacttgaccaagctggaggcagtccttacacgacttagagaacgtggtttgaaaattggcctgaagaagtgtacattcggagccttcgacgtccaatatctcggttttgaaattactgaaaaagggcgtcaaattaaagcaggcttctgtgaagacctgaccatccctgacaccgcactgcaggccgagaagctgctgggggagctggagtttgtgtctggacaagtacctggatacgcggagcgagcccaaccctgtcatggcgtgaagaagggactgcgccagatgatcggtaggaagacgcgtactttcgataggccgctgaccagcgaagaacaggaagcattcaggatcctgattgaccatgtgacacagtctgccctggtgctcgagccccgcgtacctaagacggatatttacgtgaaaattgaccttggcgaacagggatatacagcctattgctataatgagagtgggaaaaccccttgcgccgtacggagctatgcatacaagggagctgaaaagagttacaccgaggttgagaaggttctcttatcttgttttaatagcctcgctttcttgaagagtacctgcgagcccgacaatattattttcattaccccccttcatgacggaatccgtgaaatccgtaaggacactgtggaagtgaaaaaagcccaagtaagtaggtacagcaagtggctcctgatgcagactgaccccaaaattcacttccaaggtaataataagcccctgaaggtcaagaccggaaatgatacccgtgcaacccctaaaagaacaattgaagcaacctattatacagacggcagcaaaaccgataccgatttaagagcacattgggggtgggtggcccatactccggaaggacgcaagtatcatatgaagggagagacactggggagtgcccagactgcagagctgactgctgtggtcgaagccctgatagatgctagatcccgaaaatggaaaaccattgacgttgtgacagactctcattacgtgtaccttggggtaactgaggatctcgccatctgggaacgagaaaacatgcacaagcagaacggagataagcttgcacactctacattgtggcagttagttagccggtaccgggccgaactcgacttagttgtgagacatgtgagaagtcataccctcaacacagaccccgactctaagggcaattctgaggttgatgagctggttcagatgcggaaaatgtatatcccccctaggcctaagaagaaaagaaaggtgggtggttctcctaagaaaaagagaaaggtctgagaattc

SEQ ID NO: 29 - DNA, 2043 bp, synthetic construct
  source 1..2043: mol_type = other DNA; note = MG151-109_cloned_into_untethered_plasmid
gctagcgccaccatgtacccctatgatgtacctgattatgcttctggcggcagcagcggcggctcaagcggaagtgaaacacctggaacttccgaaagcgctacgcctgaatcttctggtggatcttctggcggatcttccgcatgcaataaaaagcgattacaggctatcctcgaggaggggtcttattctcagtttcgaaatgactgtggcaacatgttgacccctcccgtgaatataccaggagccagcccagctccccagaagcaataccctcttgggaaggctgaagagggtctggcggagactatcgacgagctggcccagctcggcattattaaggagacggaagataaacgcgtgacaataagtcctattcagggagttcaaaagcctgatatgagctggaggcttgtgcacaacttaagagaactcaacaaacgaactgtgccagatcagagctatttgatcaaccccaagaaagccataaatagccttccaaatcttaagtttaaaaccgcccttgacctgtcaaacggcttttggtccgtacccctcgacgaggaaagtcagctcaagactggatttcaatttcgaaggaaaacatatgtctggactcggcttccccagggatacacgaacagccctaacatcttccaggataagattaccgacctcctgagtggcttacccgtgacagtatacattgatgatatatactggtcccacgatgaggaagaagaacacctcaatgttctggaagaggttataactcggctgcgtaatgctggcttgaaaattgggcttaagaagtgtacagtcgcacgtgagcaggcagagtatctggggttcaaggtgaccgacgaaggcaggcagatccccgacgactacctgaaaggcattgtactgcccactacggctctggaggcagaaaccgtgttagggaagttagaatatgtgtcccagcacgtgcccgagtacgggatacgaagcaagaagtgtcacgaggttaagaaggggctgcgcgagggtgttggacggaaagtgaagactaacaacagacttcttaccctggaagagcagaacgatctggctgcccttatcgaatacgtaggcagggagaggaaaactttaacctctcggatcccaaagaccgatttgagagtcaaagttaccacaacaccggaagggtactctcttgcctactttaacgaggggggaaaagagccaattatgtataaaagcaaagcctggacccttccagaggctagatacggcctcattgagcagaatctttgcgcctgtttcgcttcactggccgttagccgggccatcatggagcctgaccaaatcatatttgagacagatgcaccggccctgaaagaaatgaagaaggatacgctggagtcttcaaaggctcaaatttcacgatggggaaagtggcaggcgatgcaacttgatcctaagattagcttcgtcaataaagggggcaaagtccctaagacaccaaagccaaaagaaagaggaatgccttcatgcaccctttataccgacgggtccaagcggcagggtgaagacaaggcccagtggggactgtacatcacggggcccgaaaagccagtgagaaagtccggccagatatacggctccgcaagggatgctgaggtgtgtgctgttttggaggggcttatatgggttcgagaccgcaagtacaaagtaatcgatattgtaaccgattctgactacgtttacagggcacttagagaagatctcccaatttgggaaaagaatcagatgatgaagcagaacggcaggcctctccagcagcagaacatgtggattctcatctcccagaagcgggatggcctggacattgaggtgcgtcatgtcaatagtcataccgatggatctactgccgatcacattgggaatagagaggctgacatgatcgcgcagagcagggcggtcatatgcccccctaggcctaagaagaaaagaaaggtgggtggttctcctaagaaaaagagaaaggtctgagaattc

SEQ ID NO: 30 - DNA, 2079 bp, synthetic construct
  source 1..2079: mol_type = other DNA; note = MG151-110_cloned_into_untethered_plasmid
gctagcgccaccatgtacccctatgatgtacctgattatgcttctggcggcagcagcggcggctcaagcggaagtgaaacacctggaacttccgaaagcgctacgcctgaatcttctggtggatcttctggcggatcttccgcatgcatcgaaagaattgtgaaagagtcagagctcagtgaaaaaggagaacttgagaagttgttgcggaagcatatggatagttacgccaagagcaaaaatgactgcggcaaggttcagactaaatatgaacatgtgatacaaggtgggatcccacccccccagcgccaatataaaattaacagcgctgccgaaaaagaaattggtgaaaccatcaaagagttgactgagcagggtattctcagaaagttacccaaggaagagctcgccgcttgtaactcacccttacaggcagtgaggaaaccagacggatcctggaggctggtgaccaactataaagcattaaacaaggttacaattccagatacccggtatttaataaactgcggcgaggtttctggaaacataggcagggaaaagaactggttaagtaaaatcgaccttgccaatgggttctggagcatccccctggccaaggagtctcagctcagaaccgctttcacgttcgggaccgatcactacgtctggaagaggctccctcaggggtaccgaaacagtccaaacgtgttccaagcactcatcttggaaattctcgccggtatccctgtgacagtgtatatagacgatattttgatcagcactaaggatgaggaggagcacctgaaaattttagaacaaaccctggataggttgactgaagccggtctgaaaccctcattgaagaaaatggagattggaaaacacgagattgacttcctggggtttaaactgggaaaggataccaaggctcttactactagtacccgggtgaagctggaggaaatgcagcaagcagggcccccgaagaaccgcaagcagttgcagtcactgcttggcacattgaactacattagagagttgattccgaagtattcaagagaagccaagatactttaccaggggacaaaggaagggaaatggcagtggaccgatcaaatggagcaggccaggctcaagcttatttctatggctttagaaagcggggccctcgagcggcgcgacgagactttgcccttatacgttcaagttagcgaggaggaagaagaagtgacattgaccttgtggaatgccgaaggcatctgccccattgccttcctgacacatcagcaagaaccaaccatgaaaaggttcgatgaaaattctgcagaacgcatcctggctgccgtgtgtaagcgtttgcttcaactcaaagctgtagctaaggaacagcctatagtaatctttagtatggcaggcgagctggccaggctcaagcggaacctggttatgaatcaagctcgaatcaatagccataggtgggatcagtggagcctgatactgggagacaatcagctggactggagaagaataaaacagaagcggaaagataaaattacccggtaccacgaaaatcacaaacatctgccaaaatactttacggatggcagtgaacgcggcggcaaggtaaagtggggttatttggttaaattcaacggccagctgattaccagtcagaaagaggagatccaggggaccgcacaactcgcggaagttatggccgtcgaacgggccctgcagcgggccgtggaactcgggcacactgaaattgttctgacatgtgactcagagtacgtaactgatgggattaacctcgagttggataaatggaaagccaacgacttccacacagctaagggaaaaccgatggctcaccgggaccagtggaaaaacatcgcaaacttgcttgaaaaagtaaaggcccacgtgtaccaccaggttagtcacacacagcagactaatgagagcgccgaaggaaatcgccaggtcgataaacttatcggaagagttaaaacacctaggcctaagaagaaaagaaaggtgggtggttctcctaagaaaaagagaaaggtctgagaattc

SEQ ID NO: 31 - DNA, 2097 bp, synthetic construct
  source 1..2097: mol_type = other DNA; note = MG151-111_cloned_into_untethered_plasmid
gctagcgccaccatgtacccctatgatgtacctgattatgcttctggcggcagcagcggcggctcaagcggaagtgaaacacctggaacttccgaaagcgctacgcctgaatcttctggtggatcttctggcggatcttccgcatgcatacggtcactgcgcatcgagccagtcctcgttgggaagcttcatatgactcctattgaggttcccaagcctaccaaagtgatctcctgcaagcaataccggataccaggaggccacaaggagattgccgagacaatccaggactacttgcgggctggcgtgctcgtgactactacaactcaatggaacaatcccatctggcccgtgaaaaaaagcgatggcagttggcggatgacagtggactatcgtgagctgaataaggtgacacctccccttatggccgccgtaccagataccgtgacactgatcgagaggattcagaccttccagggtacctggtacgctgtaagtgacctggctaacgctttctttactattccaattgccccccagttctgggatcagttcgcatttatgtggcagggcagacagtacaccttcacgcggcttccgcagggctacaagcattcacccacgatttgccacaggatcgtggcagaacatctcgacgatatagtaattcctgaaaagatccaaattacccattacatcgatgacatcctggtccaaggcttttccgaggcagaggtgcagaaagtattggagatactgatcgaaaagctcaaaataaagggctgggagatcaacccctctaagatccaaggaccaagtcagagtgtcaagttcttaggcatatactggaatcagggacacagacagatcgcccctgaggctaagagggcaattttggattttgcggctccgaagtccaagaaggaagcacagaagttcatcgggctgtttggttattggcgcgctcatattccccacctgggacagattttgcaacctctttacaaagtgactaaaaagaagtacgagtttgagtggggcaaagaacagtcaacagcttttgaggaggcaaagatcgccatccagaccgcccttgatctgtggcctatgagggaagggcctgtggaattacaggtcacgatcgaagatatgtatgcctcatggagtctgtggcagaaacaggaagggaaacgagtgccactgggcttctggtcacgtaagctgccttccgcgggagtgacatatacaccctttgaacggcagctgctggccgcctactgggctctggtggaaaccgagcaactcaccctggggcacgatattctgctgcggcccggcatcccaattatgcaatgggtgctgtctgatccggtttctcataagattggacatgcccaggagagttcaatcatcaaatggaaatggtacattcaaaaccgggcaaaagcaggtcccaccgggatcatgaggttgcacgaactggtatttcagagtccagttgatcccattgatagtttttcagtcgaacagcttccgaaagagaacagccccgtgatctggaatacgggctacgatgatttgacccaggaacagaaacagcacgcttggttcactgacggtgccgctaaatacatcggccaggacaggtactggaaagctatctctttcaaccccacgaccgggatgattcttgaaaccactgggaaaggaaaatcttctcagttcgcggaactgcaggctgtgtatcaagctataatgtacgaaaagggaaagcaatgtcatatcttcaccgattcatgggccgtggctaatggactggccacctggctccctatgtggcggcacaacaattggcgcatccatgacaagctgttatggggaaatgagctgtggaaggaaatttgggaaagtttaagttgcactaatgtgtctgtgtttcacgttgacgctcacgcacaagtcaattcaaaagaacgagagtacaacgctaaagctgattccctggcaacaattgcagccgcctccctcccacctaggcctaagaagaaaagaaaggtgggtggttctcctaagaaaaagagaaaggtctgagaattc

SEQ ID NO: 32 - DNA, 2151 bp, synthetic construct
  source 1..2151: mol_type = other DNA; note = MG151-112_cloned_into_untethered_plasmid
gctagcgccaccatgtacccctatgatgtacctgattatgcttctggcggcagcagcggcggctcaagcggaagtgaaacacctggaacttccgaaagcgctacgcctgaatcttctggtggatcttctggcggatcttccgcatgctctctgccattggtagaacaaaatgtgaatcctagagtttgggcagatggaaagtcagtgggacgagctcagaacgctataccggtggtggtcaagctgaaggatccgcacgtgtttccccacaagaagcagtaccccttgaagcctgaggtgaaggagggactcaagcccatcattgaaaacctgaaagaacaagggctgctgataccctgcaacagcccctgtaatacacctatcctcggtatcaagaagagcaacgggaagtggcggttggtccaagacttgcgaatcatcaacgaagctgtcgtgcctctgcatcccgttgtgccaaacccttatacccttctgtcagagattcccgaacgcgcaaagtatttctctgttattgacctgaaagatgcattttattcagttcctctggccgaggaaagtcaatttttatttgcctttgaggatcctactcaaccagcaagccagctgacatggaccgtccttccacagggattccgggactcaccacatctcttcggtcagagtttaagtcgcgatttacagaactttaattcttccgaagccgtcgttctgcaatatgtggatgatattttactgtgtgcagaaactgaggaggcttgtctcagggcgtctgaagatttcttgaatttcctggctggatgcggatataaggcgtctcgcgaaaaagctcaactgtgccagcagtccgtcaggtaccttgggctgatcatttctgaaggaaccagggctataggccctgagcgaattaagcctatcctcaatcatccccttccaatgaccctgcgccagttacggggcttctggggtatcacagggtattgcagaatctggatcctggggtatggagagcttgcatggccactgtataagttgattgccgaaactcagcaggctcaaacggataaattggtgtggagcccggagactcagaaagcctttaaggtccttcagacagcactgctgcaggccccagccttgtctctcccaaccggatctgagttcaacctgttcgtgacagagcggaagggagtggcactgggcgtgctgacccagccgaggggtcctcatcagcaacctatcgcttatctgtctcgtgaattagatgtggtgagtcggggctggcctcactgcttgcgcgtgattggagctgcagctttactggcaccggaggctctcaaaataattaacggccggaatctgactgttttaaccagccacgatgtctccgggatacttaatagcaaagtgaacatttggatgaccgactctcggttgttaaagtaccagtctcttctcctggagggtcccgtcaccaaactgaaggtatgtggtaatctgaatcccgccacctttctgccagagaaggaaaatgagaccccagaccatgattgttcccaatttctgaccttgaactacgccgctagagaagatctgaaagatacaccattagacaaccctgatatggagattttcacagatgccagtttcttcgtgtgcgaagggaagtgcaaagccggatacgctgtcgtaatggccgagcaggtgctggaggccaaatcccttcctcaggagacaagcgcccagctcgccgagttggtggcgcttactagagctctcgagcttagtaagggtcagcgagtgaatatttacactgatagtaaatatgcttacctcaccttgcacgcacacgctgccatttggaaggagcgccattttaagacagctacaggcgaacccataaagcacttccgggaaattgagaggctgctgactccgatttattgccctaaggaagtcgcagtcatgcactgcaaggggcactctagggatggctcaaaaatcgcagaaggcaatcacttagccgactgtcaggcgcgaaaagctgctctctacgagaccccaagccctaggcctaagaagaaaagaaaggtgggtggttctcctaagaaaaagagaaaggtctgagaattc

SEQ ID NO: 33 - DNA, 2076 bp, synthetic construct
  source 1..2076: mol_type = other DNA; note = MG151-113_cloned_into_untethered_plasmid
gctagcgccaccatgtacccctatgatgtacctgattatgcttctggcggcagcagcggcggctcaagcggaagtgaaacacctggaacttccgaaagcgctacgcctgaatcttctggtggatcttctggcggatcttccgcatgcataaccaagtttattacaaatttagcagccgttgagatccccccagtgatcttacccgctcctactcaggcatccttcaccccccagtatcccctgaagggtggccaccaagacataactaaggccatccagaaactgctcgacgaagacatcatcgaactgggacgcagccatatttacaactctcctgtgtggcccgttaaaaagccaaatggcacctatcgcataaccattgattacagaaacatcaacaaggtttctcctgtggtggaggggatactgcctaatgcatctgaagtgatcaacatcattcagggcgacgctccacgttacatggcagccattgacctcagcgatatgttttttgctatcccaattgacaagcaaagtaggcagattaccacgtttgcatggcagggtaaacagtttcagttcaaacggctgcctcaaggttacaaaaattctccaacaatcgcacataatatcctcgctacctacatcgatccaaaacagtataagagcaagattattcagtatatcgacgacatcctgctgtataacaacgacatcgatacactgcaagaagaccttgataagctgattcgacatctgcgccagcacggatggaccataaatccagagaagatccagaagccagacacaaaggtcacattcctcgggatacattgggactcagaaggccgcagcgtgcccaataaagtcattaacaagcctgacagccttaagtcaccaaccagcaagagggaagcccagcagctcatgggactcttcatgttttggaagcagcatatcccttacatggctgacatcgcaaaacccatctataaggtgacccggaaagctgtggatttcgagtggaacgaagaacaggaagaggcattccaacaattgaagcactacattcacctcttcagtcaactccagaacattcagtcaggtgacaagattgtgctcgatatagcattcatttcagagcacgggaactggggcctgtacaaaaagggccaggaagactcacggctcatgcctgttggcttctggtccaaaaagttcccatatagctactttaagtactctttttttgagaaactcatttggactctctatgcggctttgctgcatactgaacccctcactggacagcaaccaatcacagtccgatccactctccccctcaaggcctggttgtctttcgaggcagaagacctcgctggttcccagattgatgagaaggtgcttgcttggaagtggtatatcaacacgagaagtacctctggggccggcgggcttgccttactgacagaggaagttaataagctggaggtcgaaccccctacatgtgcaaacaagttcgttcctattgaacccatcggtgtacagggccccaagtattcccctgtgctgaaaaacgcttggtttacggatggttccgcgtccgtctctggcgatcgcactatatggaaggcagccgccttctgtccggctactcagagagcattgaccgcaacaggtgagtcaaactccgcacagcacgcggagctgattgcgacgtacattgcagtaaaagaggcggtagacacacagaaacataagatctatattttcaccgattcctgggcggtatgcaatggtataatactctggagcggaaagtggaagcagacaaattggcagatcaacgggaaagatctgtggtccaaagagtattggaagaaactggacgacctgtcctcacagataaaaatctacgccacgctggtgaacgctcatgctactgatagttctaaaacgacgctttacaacaagatcactgatcagcttgccaagggtttgacccccgaacctaggcctaagaagaaaagaaaggtgggtggttctcctaagaaaaagagaaaggtctgagaattc

SEQ ID NO: 34 - DNA, 2157 bp, synthetic construct
  source 1..2157: mol_type = other DNA; note = MG151-114_cloned_into_untethered_plasmid
gctagcgccaccatgtacccctatgatgtacctgattatgcttctggcggcagcagcggcggctcaagcggaagtgaaacacctggaacttccgaaagcgctacgcctgaatcttctggtggatcttctggcggatcttccgcatgcgagatagacactcggattatggatcaagtataccccggtgtgtgggccatcgacgttccaggccgagccaagaatgcttcaccggttattgtgaaattgaaagagggacagggggccattcggatcaagcagtatccactgaaacgagaggacagagagggtatacgaccgaacatcgagcgctttatcgaactcaaactcctcaaggagtgcgaatcagagttcaacacccccatactcccagtgaaaaagcccgatggctcctaccggattgttcaagacctgagggcaataaacaagattacagaagacctctgccctgtggttgcaaatccctattacactcttcttactactctgacacctgatttggcctggtttactgtgcttgacttgaaggatgcctttttctgtttgcccctgcacgaggcctctcaaagaatcttcgcattcgagtgggagaaccctagaagcgggcggaagacacagctgacctggaccgtgctcccccagggattcaaaaacagtcccacaatttttggaaaccaactcgctaaggacctggaactgtgggagccacctagtggggaaggcaaagtcctgcagtacgtggacgatttattgatagctacaagaaccgaggaatcttgcatcatctggaccgtctcactgctgaactttctcggactccagggctaccgggtgtctaaaaaaaaagcccaagtggtgctccaacaggtgacttatcttggatacgagattagcgctgggcagagggtgctgggcaaggcaagaaaagaggcaatatgtcaggctccacggccgcgaactgtgaaagagttacagacctttctgggcatgacggggtggtgccggttatggatctgtaattacggactgctggttaagcctctgtactccctcattgctgcaaatcagaaagacttacagtgggatgccgagtctgaccgggccttccacgagctcaagaaagctctcatgagcgcccccgcgttggggctcccagacgtctctaagccattcttcttgttctctcatgagaaacagggcatggcactgggaatcttggctcaagatctgggaccatatcgacgggcggtagcttatttttctaaacaattggacgccactgctaagggctggccgggctgtctgcgcgcggtagccgctgtgattttaaatatccaggaggcaaggaagtttaccctgggacagaagatgactgtgttggtcagtcatactggctctgcagtgcttgagacaaagggcggccattggctgagtccacagcgatttctcaaataccaggcaattatggtggagcaagacgatgtcgagatagttacgactaacattgttaaccctgcatcctttttaaacgggaatgttggggaatcagtggaccacgactgtctcgaaacaattgaggccacctatagttcacgaactgaccttaaggacgttccaatcaacggcgcagaacattggttcaccgacgggtcatcttatatgttaaacggcaagagacactctggctacgctgtgacaacctccgaggaagtgatagagtctggaccattacctgccgacacatctgcgcaaaaggctgaaattatcacccttacaagggctctcgagcgggcccagggcaaaccgattaatatatggacagatagcaagtacgcatttggggtcgtgcacgctcacggagcgatttggaaagaaaggggactcctcaactcccagggtaaaattataaaacacgccgaagagatcctgaaactgttaaatgctgttcaactgcctgagagggttgcgatcatgcacattaaggcccatcaaaaagtgagcaccgaactggaacggggaaatgaactggccgaccgggaggcaaaacaagcagccaggaaagccattaaagtgcctaggcctaagaagaaaagaaaggtgggtggttctcctaagaaaaagagaaaggtctgagaattc

SEQ ID NO: 35 - DNA, 1926 bp, synthetic construct
  source 1..1926: mol_type = other DNA; note = MG151-115_cloned_into_untethered_plasmid
gctagcgccaccatgtacccctatgatgtacctgattatgcttctggcggcagcagcggcggctcaagcggaagtgaaacacctggaacttccgaaagcgctacgcctgaatcttctggtggatcttctggcggatcttccgcatgcatgtcaattgcccccagctttgccctccctctgaaatggctgacaaaacaaccgatctgggtcgaacagtggcccctgactaaggagaagctctcagccctggagaaaatcatccagcagctccttaaggaagaccgtattgagacgagtgtttctccctggaactcccccatcttcgtcatcaaaaagaaaagcggcaagtggaggctcataacggacctgcggaaaattaataccgtcatccaaccaatgggcgccctgcaacctgggttgccacaaccgagcatgattcctaagaactggttccttactatcatcgatcttaaagactgctttttcacgatacccctgcagccccaggaccgagagaagtttgctttcacaattccttccctgaacaacaacaagcctaccagcagataccagtggaaggtgctcccacagggtatgttgaatagtcctactctctgtcaattttacgtgaatcagcctttggaaagactgaggagcttattccctagtgccctcgtcattcactatatggacgatgtattgttcgcccattatgataagattaagcttaaacagctggtcacaaaggctgagagtgtgctgggcgaatatggccttattatagctaaggagaaaatccaggagcagccacctttcgaatacttgggcaacaagctcgatcagactcggatctggccacaaaaggttgaactgagaagagattgcctgcacacactgaacgattttcaaaaactgcttggcgacattaattggctccggccttccctgggcatacccacctacgcccttaaaaatctgttcctgactctgcagggggaccccgcgctcgattcacctcggagcctctccacactggctgaaaaggagctgctgcagatcgaacagattatgcagactgcctatctcgacagaatagatcctaacgagccagttgtgttagtggtttttccctctcaacattctcctacgggaatattttggcagaaggatcttattttggagtggctgtttttacccaacaaagagcaggagcgcttgagcacatacttggacaagatctgcaagattattgctaaaggccgtctccgattaagacatctgattggaacggatccgcagcagattatagtcccactgactcagcaggagatcctttgccagtataaactgagtaacgaatggcaactggcactgcaagatttcttgggagacattcataacaacttccctaaaaacaagagattgcagttcctgaaaaagacacaatggatcctgccatctattgtgaagaccaaacccatccccaaagccgataccttcttcacagatgcaaacaaacttgggatggcagggtataccggtcctaaaactcgagtcgaacagactccttttagatcagtgcagaaggccgagttggccgccatcatcatgcttctgcaagactacagcgacccattaaaccttgtgactgatagccagtatgccgagcatacagtaaaggaaatcgagacggccaccctgatcgcagacgggtctgaaattgttcagttattttccattctccagctgttaatacggaacagatcccagcccatcttcataacgcacattcgtgcacatactgctctgccaggtcccatgtctgctgggaatgagcagatcgacagattgttaattggccctaggcctaagaagaaaagaaaggtgggtggttctcctaagaaaaagagaaaggtctgagaattc

SEQ ID NO: 36 - DNA, 2154 bp, synthetic construct
  source 1..2154: mol_type = other DNA; note = MG151-116_cloned_into_untethered_plasmid
gctagcgccaccatgtacccctatgatgtacctgattatgcttctggcggcagcagcggcggctcaagcggaagtgaaacacctggaacttccgaaagcgctacgcctgaatcttctggtggatcttctggcggatcttccgcatgcagccatccgaggatctcccatcctgtgaacccctctgtctgggatacagacaatccatctattgcacaatgtccaccagtttctattcaactgcgggaccccaccaagttcattcatcaaccgcagtatcctttaaccacatcaacgctgcttgggctcagtccaattatcagcgacctgctccataagggctatttgagaccaacccagagcccctataatacacctatcctgggtatcaagaagcccaacggaagctaccgcctggtccaggatctccgatccattaatgccgcggtgattcctatacaccccctggtccctaatccttacaccctgctttccctcattcccgcttcatctactcactttagcgtgctggacctcaaggacgcattcttcagtgttcccctggacccgtcatcccaagatctcttcgccttcacatggactgatccccacaccagacacagcgagcagctgacatggacagtcctgcctcagggatttcgggatagtccacacttgttcggccagacactgtcacacgacctcaagaacttctacccaacttgccccctctctaccctcttacagtacgtcgatgatctcctgctgtgcaatccctcttgggacataagtcagcgtgataccgcagccctcttaaatttccttgcacagcacgggtataaggtaacaccttccaaagcgcagatcagcgccagtcaggtgacttatctgggatttctgctcactccccaacacaaatctataacaacagaccgaaaacaggctttgagctcttggcctgtgccaaagactaaagctgagatccttagctttcttggactggctggatattttagggcctggataccaaatttctccttactggcgaaacccctgtataatctgagtaaaggtgatcctaatgagcccctgccctccagccctaagacgccctttaataacctgcgtttaaagctgctgtccgcaccggccctgcacctccccgatctgacacgctcatttcttctctacgtgcatgagaatcaggggcaggcacttggggtacttgggcaaatgcagggccctacctttgctcctgtggcttatcttagcaagcaattggacccgacggtgcgagggtgggcaccttgcttgagggtgctggccgcggcccagaaattgcaacaggaaacttttaagcttactttcggagcaccactgaccatctgcagcccgcaccacctgaaggatctgctcgcctacaaaagcctgcataccttgcctccctcaagagttctggccttaatcacctcctttttggaaaatccttctatttccttccaatcttgttcaccactcaatcctgccaccttgttacccgtacatcctacaccagaaccccctctgcataactgtttagaaactcttcaatccctcacacatagtccaagcaccattgtcgaagggcctctgccccatgcagatcataattggttcaccgacggcagttcttacagaagcccaactgcgcccaaggccgggtacgccatcgtctccttgacagctacaattgaggcccaacccctgcctcttggcactacaaaccagcaggctgaactcatcgcagcaacacgagcttgtattctcgcagaggggaagaccttgaacctgtacacggatagcaaatacgttttccatactctcctctcccatagcgctatctggaaagaacgcggattcatgacaacacggggaaatacgatcaccaatagcgatttaattcacaaattactgcaggcatctcagttgcctacccggctcgggataattcaccgcaaagctcataagaaggataacagccctagtacccaaggcaatcgactggccgatgccgccgctaaaaacgccgcttttagtaaaagtagcgagacacctaggcctaagaagaaaagaaaggtgggtggttctcctaagaaaaagagaaaggtctgagaattc

SEQ ID NO: 37 - DNA, 2052 bp, synthetic construct
  source 1..2052: mol_type = other DNA; note = MG151-117_cloned_into_untethered_plasmid
gctagcgccaccatgtacccctatgatgtacctgattatgcttctggcggcagcagcggcggctcaagcggaagtgaaacacctggaacttccgaaagcgctacgcctgaatcttctggtggatcttctggcggatcttccgcatgcggtagcccaacagcatccatccgactgttacagcaggccccagctcttcctccatccaaaactgtaaatgtaaaaccttatgcccttcccttgggtgcgcgggaagggataacgcctgtcatagccgaactcagagagcaaggaattattgtgcctacccacagcccctataatagccccgtgtggcccgtccgtaaaccaaatggtaaatggcgattgactatcgactaccggcgcctcaatgctaacaccgggcctctcacagcagcagtgcccaacattgccgaactcatcgccactatacaggagcaggcccatcagattttggccacaatagacgtaaaagatatgttttttatggtccccatacaggaagcggatagggatcggttcgcctttacatgggagggggttcagtttacattcacccggctcccacagggctattgccatagtccaaccatcgcccactacgccttggctcaagaactcgcccaaatccctccaagagagggcgtgcggatctaccaatacattgacgatgtccttattggtggctcagacgccgccgctgtcggccaaactcagaccgaaatcattacacaccttgagaacttagggctgcaaatcccggctgagaaagtgcagcttccctctagcgaagtcaaatttctgggcatttggtggaggggtggtaccgtttgcattccaccagaaacattaactaccctggaggaagtcaaatcaccagaaaacaagaaggaactgcaacacgctctgggtctgctggtcttttggaggaagcatatccctgatttctctataatcgcacggcccttgtacgatttaacaaggaagagagcaacatgggactggactcctgtgcacgaggaagccctgaagcttcttattttcgaggcgggggtttatcaggcccttgggcccattcatccaaccgatccattccaaatcgagtggggttttgccattcacgggctgtctattcacatgtggcagcgcggccctgagggtaccaccaggcctatcgggtttcacagtcggagttttaaagacgctgagaagagatactccatttgggagaagggattgtttgtcgtcacgcttgcactgcaagaagcagaaaaaatcatcagacaacagttaatcatactccggggacccttcaaagttttgaagcctgtactggctggaactcccccaccagtcggggtggcacaacgggatacggtgaggaagtggtacgcccaactggaccactactgtcacacatatcaaattgaggagggtgctcctaaggtcctgaaaatccaggaccccccatccgatcaccctgaaccaccaccttcttacatcaagccagcccctccttttgagactcatcttaagaatgtatggttcaccgatgcctcctcacgccgtgaggggaaagtctggaaatacagagccgtggcactgcatgtggattcaggagacagaatcattacagagggggagggatccgcacaggtcggagagctgacagctgtatggtcagtgatagtaaaggaggctgaaacaactgagcctgtgttcatctataccgattcatacgcagtgttcaaaggctgcaccgagtggctgactttttgggaacagaaccattgggaagttaatagagtacctgtttggcagagggagaaatgggaggagattctgaatattgctaaacgcaaatccttccttgtgggatgggtcgccgcgcaccagtctggtaaccaccctgcacatctgctgaataaccaggtggactcaatgacgcgcctgatgagaactgcgacccctaggcctaagaagaaaagaaaggtgggtggttctcctaagaaaaagagaaaggtctgagaattc

SEQ ID NO: 38 - DNA, 1491 bp, synthetic construct
  source 1..1491: mol_type = other DNA; note = MG153-1_cloned_into_untethered_plasmid
gctagcgccaccatgtacccctatgatgtacctgattatgcttctggcggcagcagcggcggctcaagcggaagtgaaacacctggaacttccgaaagcgctacgcctgaatcttctggtggatcttctggcggatcttccgcatgcatggacacctcaagccttatggaacagatattgagtaaagaaaatctcaacgctgcctacctccaagttgtgagaaataagggtgctgccggagtagacgggatgaatgtcgaagaactgggtgcgtacctctccgagaacggcgagaacatacgagaacagcttcgcacaaggaaatacaaaccccagcccgtgagacgagtcgagatacccaagcctgatggaggggttcggaatttgggtgtacctactgtcgtggatcggtttgtacagcaagccgtggcacaggtcctcacacctatcttcgaggagcaattccacgaccatagctacggattcagaccaaaccgctgtgctcaacaagcagtcctgaaagccttagaaatgatgaatgacggccacagttggatcgttgacattgatctcgcgaaattcttcgatacggtcgaccacgacaagttgatgacgatcttcggcagaacaatcaaagatggtgacgtaatcagcgtagtgagaaaattcttggtatctggcgttatgatcgatgatgagtatgaggatacgatcgtggggaccccacagggtggaaacatatcaccactcttggccaatatcatgttaaatgagctcgataacgaactggaggctcgtggacttaacttcgtgcgatatgccgacgaccttataattatggtcggctctaaacaggccgccgatagagtgatgaagtctgtgaccagattcattgaggaaaagctcggactgaaggtgaatgctgaaaaaagcaaggtcgataagcccaagggaattaagtatctggggttcggcttctacttcgacacctttgccaaggcatacaaagctaggccccatccaaaagctgttaccaagtttaaagcccagatgaagaagctgacatgtcgaagttggggagtgagcaatgcttacaaagtgcaaaagctgaatcagctgatacgtgggtggatcaactattttaaaataggcaatatgaagagattatgccaacggctggactctaatattcgttatcggttgcgcatgtgtatctggaaacattggaaaacacctaaaaatcgtgccaagaatatgatgaagctcggactgcccgcctgggccgcctggagatcagcttatatccacggttatgctcgggtctgtcggtccagagacgtccacagaacaattacctcagagcgactcaaacaattcggcttgatgtcaatgaccgactactacaccgagcgaagcgtggcctgtcctaggcctaagaagaaaagaaaggtgggtggttctcctaagaaaaagagaaaggtctgagaattc

SEQ ID NO: 39 - DNA, 1494 bp, synthetic construct
  source 1..1494: mol_type = other DNA; note = MG153-2_cloned_into_untethered_plasmid
gctagcgccaccatgtacccctatgatgtacctgattatgcttctggcggcagcagcggcggctcaagcggaagtgaaacacctggaacttccgaaagcgctacgcctgaatcttctggtggatcttctggcggatcttccgcatgcatggacaccagctctctcatggaacaaattttatctaaagacaacttgaacgcagcctaccttcaagtggtgcgtaacaaaggtgcagcgggagtggacggaatgacagtagaggaactgggggcatacctctctgagaacggcgagtctattcgggaacagttgcggacccgcaagtaccgaccccagccagtacggagagccgagatcagtaagccagacggtggtgtacgtaaactcggagtccctaccgttgttgatcgattcgtgcagcaagccgtggcccaggttctcacccccattttcgaggaacaattccatgatcacagttatggatttcgacccaacagatgtgcccagcaggccgtgcttaaggccctggaaatgatgaacgacggacactcttggatcgtggatatcgacctcgccaagtttttcgacaccgtggatcatgataagctgatgaccatcttcggcagaacaataaaagacggggacgtgatatctgtcgtccgcaaatttctcgtgagcggcgtgatgatcgacgatgagtatgaggacaccattgttggaactccacaaggggggaatataagccctttgttagctaatatcatgctgaatgagctcgataaagaactggaagctcgcgggttggacttcgtaaggtacgcagacgacctcattatcatggtgggatcacggcaggctgcagacagggtgatgaagtccgtgactcggttcattgaggagaggttaggcctgaaagtaaatgccgaaaagtcaaaagtagataagccaaaagggattaagtatctgggctttggattttacttcgacagcttcgccaaggcgtataaggcgcgtcctcacccgaaagcagtcgctaaattcaaagctcagatgaaaaaacttacatgtcggagttggggagtttctaactcttataaggtgcttaaattgaatcagctgattagaggctggataaactacttccggatagggagcatgatagaactttgtaaacgcttagacgaaaacattaggtttcgtctccgtatgtgtatttggaagcactggaagacccccaaaaacagagccaagctgttgatgcttctggatgtccctcgttgggccgcctataagatcgcatatagcggcaaccgatacgcgcggatcacacacaacggctgggtgcacaaagcaatatcaaataaaaggttggccgcgttcggtttgattagcatggaagattactatgccaagcgccgggtggcctgtcctaggcctaagaagaaaagaaaggtgggtggttctcctaagaaaaagagaaaggtctgagaattc

SEQ ID NO: 40 - DNA, 1494 bp, synthetic construct
  source 1..1494: mol_type = other DNA; note = MG153-3_cloned_into_untethered_plasmid
gctagcgccaccatgtacccctatgatgtacctgattatgcttctggcggcagcagcggcggctcaagcggaagtgaaacacctggaacttccgaaagcgctacgcctgaatcttctggtggatcttctggcggatcttccgcatgcatggatacttcatctctcatggagcagatcctgtcaaaggataatttaaatgccgcctacctgcaagtcgtccgaaacaaaggggctgccggagtcgatggcatgaccgtggaggaacttggtacgtatctgagtgagaatggcgaatcaattagggaacagctcagaacccgaaaatataaaccacaaccagtacgacgagtggaaataccaaaacctgatggcgggatcaggaatttgggtgttccaacggtcgtggacaggtttgttcagcaagccgtcgctcaagtgctcaccccaatatttgaggaacagtttcacgatcactcctatggttttagaccaaatcgctgtgcccagcaggcagtcctgaaagctctggaaatgatgaatgatgggcatgactggattgttgatatcgatcttgccaaatttttcgatacggtagatcacgataagctcatgaccattttcgggcggaccattaaagatggcgacgtgatttctgtggttcggaagtttttggtgtctggcgttatgatagatgacgaatacgaggatacaatcgtcggaactccacaaggaggcaatattagcccacctttagctaatattatgcttaatgagctcgacaaagaattggaggctcgtggactggactttgtgaggtacgcagatgacctcattattatggtcggctctcgccaggccgctgaccgtgtgatgaagtctgtcacacgttttattgaagagagactgggcctgaaagttaacgccgaaaaaagcaaggtggacaagcctaagggcattaagtatttaggctttggattttatttcgattcttttgctaaagcctataaagctcggccacaccaaaaggctgtcgcaaaatttatggcacagatgaagaaactgacctgtcggagctggggcgtgtctaatgcttacaaagtccaaaagttaaatcagctgattagagggtggattaactactttaagatcggatcaatgaaaggtctctgcgagagattagattgtaacattaggtataggcttcggatgtgtatctggaagcactggaaaaccccgcagaaccgagcaaaatacctgatgcaattggggataggccggaaatacgcttggagcaccgcctatacaggtgcccggatcgcttacgtctgtcagaggggtgcaatgaatatggctataacaaaggaacgcttaacccgcttcggcttggtatcaatggcagattattatgcaaagcggcgggtaacatgccctaggcctaagaagaaaagaaaggtgggtggttctcctaagaaaaagagaaaggtctgagaattc

SEQ ID NO: 41 - DNA, 1491 bp, synthetic construct
  source 1..1491: mol_type = other DNA; note = MG153-4_cloned_into_untethered_plasmid
gctagcgccaccatgtacccctatgatgtacctgattatgcttctggcggcagcagcggcggctcaagcggaagtgaaacacctggaacttccgaaagcgctacgcctgaatcttctggtggatcttctggcggatcttccgcatgcatggacacatcatccctcatggaacagatcctgtccaaagaaaatctgaatgaggcttatctgcaagtggtccgaaataaaggagcagcaggtgtggacggaatgagcgtggaagaactggggccttacctttctgaaaacggcgaaaatataagggagcagatgcggacacgcaaatacaaaccacagcccgttaggcgggtggagattcctaagcccgatggtggggtccgcaatctcggtgtacccacagtcgttgatagattcgtgcagcaagctgtagcccaggtgttgtcaccaatattcgaagagcaattccacgaccattcatacgggttcaggcctaatagatgtgcccagcaggcggtcctgaaggccctggagatgatgaatgacgggcacaactggattgtggatatagacctggcaaagtttttcgataccgttgaccacgacaagttaatgaccattttcgggagaactattaaagacggagacgtcataagccttgtccggaaatttctggtgagcggtgttatgatagacgatgaatacgaggacaccattgtgggcactccacagggaggaaatatctctcccctgttggctaatatcatgcttaatgagttggacaaagagttagaagccagagggcttgattttgtccggtatgccgacgatctgattattatggtgggctcaaggcaggcagcagaacgggttatgaaaagcgtgacccggttcattgagaataaacttggtctgaaggtgaatgcagagaagagcagagtagataaaccaaagggaattaagtaccttggttttggcttctacttcgacagctttgcaaaaggttacaaggcaagaccccatatgaaggccgtcgagaaattcaaagagcagatgaagaaactcacctgtcgatcttggggagtgtccaatacatacaaagtaaagaaattgaaccaactgatcagaggctggataaactatttcaaaataggctcaatgaaaaacctgtgcagaaaattggacgctcatattaggtttagactgagaatgtgcatttggaagcagtggaaaacccctaagaacagggaaaaaaacttgatcaagttagggttgcctcgttatgccgcccacgggatctcatacgccaagggatatgcccgggtctgtcgatcttggaatctgcacatctcaatatcaaaagagcggctggcaaagttcggcctgatatccatggaggattattacgcagaacgaagggttacctgccctaggcctaagaagaaaagaaaggtgggtggttctcctaagaaaaagagaaaggtctgagaattc

SEQ ID NO: 42 - DNA, 1500 bp, synthetic construct
  source 1..1500: mol_type = other DNA; note = MG153-5_cloned_into_untethered_plasmid
gctagcgccaccatgtacccctatgatgtacctgattatgcttctggcggcagcagcggcggctcaagcggaagtgaaacacctggaacttccgaaagcgctacgcctgaatcttctggtggatcttctggcggatcttccgcatgcatggatacttcctctttaatggagcagatcttgagtaacgagaaccttaatgctgcttatcttcaagtggtacggaacaagggggccgctggcgtggatggaatggagtacaccgaattacagaaacatctgtcagagaacggggagataattaaagaacagctccgcacccgaaagtacaaacctcagcccgttcggagagtggaaattcctaaggccgacggtggcatacgcaagctcggcgtgcctactgttaccgacaggtttattcagcaggcaattgcgcaggttctgacgcccatctacgaagagcagttccacaatcattcatatggctttagacctaatcgatgtgcacagcaggccgtgatgaaagctctggagatgatgaatgatggtcactcatggatagtcgacatagatctggagagatttttcgatacagttgaccacgataaacttatgacgatcatcgggaggacaatcaaagacggcgacgtgatctctattatccggaagttcttagtctccggcatcatggttgacggagagtatgaggactcagtcattggtactcctcagggcggaaacctttcacctttgctcgcgaatatcatgctcaacgagctggataaagaaatggaggctcgcggcctcgatttcgtgcgctatgctgacgactgcattattatggtgggttcaaggcaggcagctgagagagtgatcagatcaattacaaggtacatcgaggagaaactgggcctgaaagtgaacgcatccaagagcaaaattgacaaacccaaaggcataaagtacctgggctttgggttttactacgatagttttgcgaaagaatatagggccaagccacatgccaaggcagtagagaaatttaaggcacggatgaaggaactgacatgtagatcatggggtgtggacaatgggtacaaagtgaaaaagttaaacgaactgatcaggggatggattaattattttaaaattggcagtatgaaagggctctgcgaaaagctggacgccaatatccggtaccgcctgcgaatgtgtatatggaagcactggaagactcctcagaatcgggccaagaatttgataaaactcggtatctcccgccgatacgcctggtccaccgcctactccggagcgagaatcgcctacgtgtgccagagaggagccatgaacattgctgtgacaaaggaaaggttgacaagatttgggctggtgagtatgttggactattacgtggagcgccgctccttaatgttgagtcctaggcctaagaagaaaagaaaggtgggtggttctcctaagaaaaagagaaaggtctgagaattc

SEQ ID NO: 43 - DNA, 1515 bp, synthetic construct
  source 1..1515: mol_type = other DNA; note = MG153-6_cloned_into_untethered_plasmid
gctagcgccaccatgtacccctatgatgtacctgattatgcttctggcggcagcagcggcggctcaagcggaagtgaaacacctggaacttccgaaagcgctacgcctgaatcttctggtggatcttctggcggatcttccgcatgcatggaactgattgactggatcctggctgaccagaatatcgacgctgcaatttgggccgtgaaacacaatcgcggcgcagcagggatagattcaatgcaggtcgacgaactcgatgaatattttaagaaccatagagaggagattaaacaacttatacgagaaaaaaagtatgtcccccagccggtgcgcagagtctacattccaaaacccgacggaaagcagagacccctgggcataccaaccgttgtagatcgtgttattcaggaagcaattgcgatagtgctgatgaagggatatgatagatacttttccgagtacagctacggcttccggcctaaccgaaactgccaccaggctgtcactaaagccctggaatacatgaacagtggctacgagtgggtggtagaccttgacattgagaaatactttgatactgtaaatcatgataaactggtttcaatattaagggagcgaatcaatgacgacactaccctccacctgattagggctttcttgaaagctggagtgatggaaaatgggttggtctcaccaactgagcagggcgtgccccaaggcgggccactctctcctgttttgtctaacgtgtatctggacaagctggacagggagttggagaacagaggcttacacttctgtcgatacgctgatgattgtactatctatgtaggaagcgagatggctgcaaatagagttatgaggtctatagctgactggctggggcgcaagctgaaattaagagtcaatatgactaaaagcaaggtggtacggccttcaggcagccaatttctcgggtttcggttttggaagagcccaagggaaggctggaaacctaaacctgccaaagagagatgcaaaagactcaaggataaggtgagggcgatcttgtgtcgccgaaaggccgttgcagtgcccttaggagtcacgattacaaagttgaatcagttaatgcgtggatggatcaattacttctgcctgggttccatgaagggatttatgaaggagtttggggaatggatgcgacacaaagtacgcgttgtgattttaaagcaatggaagaaggccgatactatctacaggaacctgaggaaaacaaatcgtatctgcagatgtggcatttctgacgaagaaatatacaaggtggcttattccggtcgaggttggtacaaacgagctactcataacgcagtgaatttcatactgagtccacaggtactgagtcagcggactaagcaaaggccaggactggtggatccgcttaagtattaccttgcaaggtgtactcctaggcctaagaagaaaagaaaggtgggtggttctcctaagaaaaagagaaaggtctgagaattc

SEQ ID NO: 44 - DNA, 1602 bp, synthetic construct
  source 1..1602: mol_type = other DNA; note = MG153-7_cloned_into_untethered_plasmid
gctagcgccaccatgtacccctatgatgtacctgattatgcttctggcggcagcagcggcggctcaagcggaagtgaaacacctggaacttccgaaagcgctacgcctgaatcttctggtggatcttctggcggatcttccgcatgcatgggaaccgaaaaccgagagagctgttctcagcgcgacagtgctgaaagaaaaggctatgtgcgggcccaccgctccttcaaccgtatctggaaggaacgggattccgctgaacccgacattctcggtaaaatcctggaaaaagacaacctgaacagagcatataagcgtgtaaaagccaataagggcgcccccggggtggacgggatgaccatcgaggcaacattgccatggcttaaggagcacaatcacgagctggtggaacgcatacggaagggtaaatacacaccttctcccgtgcgacgtgtggagattcccaagccagacggaggcattcgtaaattaggcataccaacgattatcgaccggattattcagcaggcaatgctgcagcccctcctgcccatttatgagccgcttttcagtgatgacagcttcggatatcgtcccggacgaggagccaaagacgcgatttttcggattaaagagtatattgagcagggctacacgcgtgccgtggtgcttgacctgtccaaatactttgacacactgaaccacactattctcctcaatctgctgagaaggcaggtcaaggacgaaagagtgattcagatggtcaagcgttacctcaaatctggtgttatggaaaacggggtggttgccgaaactgaagaggggtctccccagggcgggaatttgtcccccctgttagcaaatgtgtacctcaacgaatttgattgggagttccacagaaggggcgtcccatgcatacgctatgctgacgacattgtgctcctggcgaaatctgagcgagccgccgagaggttactcgaatcatccgctaagtacctcgaggagactctcaagttaaaggtgaatcgcgagaaatcccggacggtttctgtatttgccatcagaaacttcaaattccttggattttgttttggtaagaacggcaagggaatttacattcgtatccatggcaaaagctggaagaaggccaaagataaattacgacagctcaccagccggagcaggtgcgggtcaatcgtgcgtacaatggagaagattaaggtctacatgaggggctggcttaactactacgggatcgcagatatgaagaataatatggaaagcttgaatggttggctgtacagaaggattagaatgtgtatctggaaacaatggaaactgcccaagacccgtaagcgaaagcttgccggactgggggtcgatagccattatgctgccaccattgcctatgatagaaagggctactggtttaacgctggcaataaggcagtgaactgggccctgagcaaagaacgtctcacaaactgggggttgtatgacctggcaactgcatatcaaagcgtccacgtgaactaccctaggcctaagaagaaaagaaaggtgggtggttctcctaagaaaaagagaaaggtctgagaattc

SEQ ID NO: 45 - DNA, 1491 bp, synthetic construct
  source 1..1491: mol_type = other DNA; note = MG153-8_cloned_into_untethered_plasmid
gctagcgccaccatgtacccctatgatgtacctgattatgcttctggcggcagcagcggcggctcaagcggaagtgaaacacctggaacttccgaaagcgctacgcctgaatcttctggtggatcttctggcggatcttccgcatgcatgaaacttattgaaacgatcctgttttctgaaaacgtgattaaagcacagagtagagttctctctaataaaggaggcgcaggcattgacgggatgcacgtcgacgaactggcagagtatatgagggcaaattgggacggaattaaagaaagtatattggtacgtaagtataaccctgctcccgtaaggcgcgtagagattccaaaagtgaatggaggcgtaagaaagctcgggattcccacggtgcttgatcggactattcagcaggcaatagtgcaggttctttctcctatatttgaaaatgagtttcaagaaaattcttacgggtttaggccatgcaggtcctgtgagcaggctattcttaagctgctggaataccttaacgaaggctacgagtggattgtggacatagacttagaaaaattttttgataacgtcccacaagataaacttatgtcctacgtagggagagttatccgtgaccctgacaccgagagcctcatccggaaatacctgaaaagtggggttatggagaatggcatctacgaggctacggaagaagggaccccccagggcgggaatctgagtccgcttctgtccaatatcatgctgaacgagttagataaggagctggtcaatcgaggactccattacgttaggtacgcggatgattgcgtcattgcagtcgggtctgaagcctctgctaaacgagtgatgagaagtgttacgacgtggattgaacgagagttgggactcaaggttaatgcgagcaagagccatatttgccggcccacgaaacttaaatacctgggattcgggttctatcggaaccctcagaatcgccagtggcagagtaggcctcatgaaagttctgtgagcaaatttgtgagatccctgaaacggctgtgtaaaaggagctggtctgtgagtatgaccgatcggattacgcggctcaactacgtcacccgtggctggattaattatttttctatatctttcatgaagctcaagcttgagaaaatcgacgagcaccttcgaaccatgttgcgaaaagtaatctggaagcagtggaagacacctcagaagagggcctggggccttcggaaacttggggtcgacagcgctctcgcacggcggacttcattttgcggcgatagatatgagtgggtggtgaggcgcacctgcgtggcgagagctatatccaaggacgtcttcacgaggcgaggattggtgagctgtctggactactacctcattagacacagtcttaaaaccagccctaggcctaagaagaaaagaaaggtgggtggttctcctaagaaaaagagaaaggtctgagaattc

SEQ ID NO: 46 - DNA, 1611 bp, synthetic construct
  source 1..1611: mol_type = other DNA; note = MG153-9_cloned_into_untethered_plasmid
gctagcgccaccatgtacccctatgatgtacctgattatgcttctggcggcagcagcggcggctcaagcggaagtgaaacacctggaacttccgaaagcgctacgcctgaatcttctggtggatcttctggcggatcttccgcatgcatggagtcttatctcacacaggatagagccgaaccagaggccggctgcggtgctaacagcgtgagtgacaccgagggcgacggaaggacagttcagcacgaccttgttgaggaggtcgtatcttggtccaatctcgaggccgccttaaaacaagtggtgtctaacaggggggctcccggagtcgatggaatgaccgtggacgagcttggaccctggttggagactaattactccgagcttgcagaaaaggtccgcaacggtagatatcggcccaacccggtaagacgaaaagaaattcctaaaccaaatggcggcgtgcgagacttagggattcctaccgtcgtggacaggctgctccaacaggccgttagtcaggtgctgatgcccatatacgagcctagcttcagtgacactagctacggattccggcccggccgttccgctcatgatgctatccagaaagccaaggaatacctgagtgaagggttcggatacgtggtggatctggacctggccagattcttcgacaccctgaatcaggattacctgatgaacatcctgcgggaacgcgtgcgggacaaagcattgttggaacttataaaacgatttttgcgcagtggggtggtcttgccaaatggcctgctgagagaaaccagggagggtagccctcaaggaggccctttgtctcccctgttgtcaaacatataccttgatcgcttcgataagctgttggagtcacgcggcttgagatttgtgcgctacgccgacgattgcctggtgttcgtgaggacaccgagggcgggagaacgcgtgcgcgaatccgttacccggtatctcgagggaaccttgcgcctcagagtgaatcaggaaaagacagttgtgggacgcgccgatcaggtcaaattcttaggtttcagactgtataggcagaagaccgttggggccacggttcatgactcttcactggctcgcttccgaaaagaagtgcgtagaattacgaaacgcaaccgaggaacctcactgggctccgtcctgaccgaactgaagacgttcactcgcggatgggttggatatttccgaatagggttaagcaaatccagggcggagaagctcgatggttggattcgccagagagttaggcagtatattttcaaacagtggaagacactgcggaatcgcgcttcccagcttgtgtctctctgccctgactatttaagacctagacctggcttcacaccgtactcatgggtgcgggagtgtcgacgcgccgccttcagcagaagctattggaaggcggttaattaccccgttgttaagagggccttatccaattcttatctggctggactggggctctactccttatcagagcaactggaaaagtggaataaaggggtacctaggcctaagaagaaaagaaaggtgggtggttctcctaagaaaaagagaaaggtctgagaattc

SEQ ID NO: 47 - DNA, 1617 bp, synthetic construct
  source 1..1617: mol_type = other DNA; note = MG153-10_cloned_into_untethered_plasmid
gctagcgccaccatgtacccctatgatgtacctgattatgcttctggcggcagcagcggcggctcaagcggaagtgaaacacctggaacttccgaaagcgctacgcctgaatcttctggtggatcttctggcggatcttccgcatgcatgaaagacggaatgcagaagacttccgccctcgcaaacgactacccccagagaaacagaaccgaatcagagcggtatggaggggtgcagacctttatgtggatgactgaagacaacatcgtcgaggtgccatttgacaaagaacacctgctggaagtgattctttcaccagataatctgaacaaggcatataaagccgtggtccgaaataaaggctgtggaggcatcgataaaatgtcttgcgagcaattattaccgtggttgaaagccaataaagacgagctcatcagatctttgttagacggcacatatagacctaacccagtgaggcgtgttgagatcccaaaagataatggcaagatgcgacttcttggcattccgaccgtggttgaccgcatggtccagcaggccattaatcaggtcttaaccgtgatctacgaaccacagttcagcaagagatcttttggcttcagacccaggcgcggctgtccaaccgcccttagggaggtccaaaaaatcgtgaacgaagggtacaaatatgtggtggatctggatttagagaggttttttgacactgtctcccacagtaaactgatagaaatactgtctaggacactgaaggacggccgggtggtgagcctgattcaccggtatctgcggtccggcgtgatcgacaagggcctgtggcacgcatctgaggaaggtacaccccagggaggccccttatcaccactgttgtcaaacattatgcttaatgagctggacaaggagttggcgagacgaggacatccttttgttagatatgcggacgattcaatgatcttctgtaaaacaaagcgagcagcagagcgcgtgagagaatctattaccaagttcattgaaggaaagctgttccttaaagtgaataaggaaaaaacggccgtgagttacataaagggagtgagatatcttgggtattccttctacatccacaaaggcaagtgccagcttacggtgcatccaaaaagtaaagccaggatgaaatctcgcctgaaggaactcaccagtcgttcaaacgggtggggttatgaaaagcggaagcagaagttaaaagaatacatacaagggtgggtgggatactaccatctcgcagacatgaaaagactgtgtatggagaccgataaatggctgagaaggcgaatacgtatgtgtatctggaaagcttggaaaaagccgagaacaaaggtggctaatcttattaagtgcgggatcgcagaatggcaagcttaccagtggggcaacacacgtctcgcctattggaggattgcccactcacccatccttcttacggccatcagcaatgaccgtcttaggaagcagggttacatgtgcttgatggacctctatctggaatggaatccgaaacctaggcctaagaagaaaagaaaggtgggtggttctcctaagaaaaagagaaaggtctgagaattc

SEQ ID NO: 48 - DNA, 1581 bp, synthetic construct
  source 1..1581: mol_type = other DNA; note = MG153-11_cloned_into_untethered_plasmid
gctagcgccaccatgtacccctatgatgtacctgattatgcttctggcggcagcagcggcggctcaagcggaagtgaaacacctggaacttccgaaagcgctacgcctgaatcttctggtggatcttctggcggatcttccgcatgcatgagcctgggacgtgccgttcatcaaaaacccggagatacaggacgatccgccggaaggcgaggggaagccgagccaaaagcgatgcgagacgaggcaagaacagcgcggcatgaaactgccagcccaggccgtgaagatcttttaggacaggctttggcatcagcaaaccttgaagcagcatggaaacgagtgaaaagtaatagaggatccgcaggtgttgacggactgagcatccgagacactgcagagcatttgaagatgcattggccaaggattagagcaagcctgttggatggctcatacagatctcagccagtgcggcgagtccagatcaggaagccagacggagggatgcgggagttgggtatcccaactgtcacagaccgcctgatccaacaagctttgcttcaagtactccaaccaagactcgatcccactttcagtgaacactcacatggtttccggcctggcaggagggcgcacgatgctgtgctggaagcgcagagatatgtgcagagtggatacagagtggtggtggatgtggatctggaaaaattttttgaccgagtaaaccatgatattctgatggccaggttggcacgcagaattgacgataaggctgttctgagactcattcgcagatatctggtcgcagggattatggatggtggtgttgtgatggaacgatacgagggaactcctcagggagggcctctgtcccctcttctggctaacgtccttctggacgaagttgatcgggaactggagagacgaggccatcgtttcgtgcgttacgcagacgattgtaatgtgtacgtaagaagcaggagggccggagagcgagtcctggctggactccgtaggctttatgaaaggctgcacctgaaagtgaacgaggctaaaactgcagtggctcccagtagccggagaaaattcctcggctatgccttctggtacgggccgggaggacaggcaaagtgcagagtcgccgataaggcaaaggaaacttttaagcagaggatccgcgaaatgaccagacgatccggtggtcgctctcttccagatattgtcgagaggctgcaaacctaccttcctgggtggaaggcctacttccaacttgcccaaacaccaaaggtgttccatgagctggacgagtggattcgtcacagactgcgcgctgtgcagctgaagcattggcggagaggaaagaccatgtacagagaactcaagacgatgggggcctctgagacagatgcccgacaggtagctgcaaattctcgcaggtggtggagaaattcccgctttctgctcaatagagctatgccgatcgcctattttgatcgcctgggtgtgccaagactgagtcctaggcctaagaagaaaagaaaggtgggtggttctcctaagaaaaagagaaaggtctgagaattc

SEQ ID NO: 49 - DNA, 1626 bp, synthetic construct
  source 1..1626: mol_type = other DNA; note = MG153-12_cloned_into_untethered_plasmid
gctagcgccaccatgtacccctatgatgtacctgattatgcttctggcggcagcagcggcggctcaagcggaagtgaaacacctggaacttccgaaagcgctacgcctgaatcttctggtggatcttctggcggatcttccgcatgcatgcaggtggataaggttttcctgatgaccgataacctgtcttctacacaatgccggaacgagacattattgggagccgatggtatcagggcgcgggttgcaggacctcgcccaaaaggagtgagcgtaaaggcaactcctagctggactaaggcagatccgggatggtgtaacattgagaaggtcgttaattcaataattatcgatgaggccctcagtaaggtgatatccaaccgaggctccggtggcgttgaccatatcaccactgctgaactccgcgattattggagcaagtatgggggaaccattaggcaaaagattgtgcaaggaacatacatcccgctgcccgtgaaacgggtggacatccccaaaccaaacggtgacaaaaggatgctgggtattccttccgttattgacagagttatacagcaagcattggttaatgtgctcgagcccgtgtttgacccacagttttctgagttcagctacggctttagaaagggacggaacgcacaacaagcggtcttacaggcacagagttacattaaagacggacatagatgggttgtcgaactcgacttgtctaaattcttcgacagagtgaaccacgatatcctcatgtcacgcgtcgcccgggttgttgaagataaacggatccttaaattgataagaaggtacttgaatgccggcataatggaagatggcatcgtaaaacctcgcagcgagggagtgccgcagggcggacctttatccccgctcatgagcaacatcatcctgactgagcttgaccgcgagttggagaaaagaggccacaagttctgtagatacgcagacgattgtaacatctacgtgaagagcgaggaggccgctaagagagtgctcgaaagtgtcacaaagtacctcgagggcggcctcaaattgagagtcaatcgagataagtccgggacttttcggccatatgagtctgtctttctgggatacagtttccaccgccgaaactggacccgtattgtggtggcagaggagagtattaagcggctgaagacaaagcttaagataatctaccgtcatagtcggggcacgagcctgggcaccgcaataaaaaagttgaaccaaattctgaggggctggaggacatattttaagctggacaccaggaagggcttttttgagaagctcgatattaatattcggactcacctgcgggtcttgatttggcgagcatggaaaagaccacgtacccgcgaaagagagctccgtaaacgtgggctggacgcttttaatgcctggaagagcgccaacaacggccgcggcccctggtataatgcacgagcccctcacatgagaatagcaatcccaaatgctctgtttgtgagactgggcctgtacaacctttcttctatgggcacagtccctaggcctaagaagaaaagaaaggtgggtggttctcctaagaaaaagagaaaggtctgagaattc

SEQ ID NO: 50 - DNA, 1500 bp, synthetic construct
  source 1..1500: mol_type = other DNA; note = MG153-13_cloned_into_untethered_plasmid
gctagcgccaccatgtacccctatgatgtacctgattatgcttctggcggcagcagcggcggctcaagcggaagtgaaacacctggaacttccgaaagcgctacgcctgaatcttctggtggatcttctggcggatcttccgcatgcatggtgtcactcgaaaaaatacttgagcctagtaatctgactgaggccctgaaacaagtggtgtctaacaaaggggctccaggcgtggatggaatggccgttgacgagctggagcctttcattagaaaccatcccggagtgctgtcccaggccatccgggatggctcttatcgcccctctcccgtgaagagggtgtacattcctaaagacaatggggaaaaaagaccactgggcatccctactgtggtggacagactggtgcagcaggctatagcccagaaactttcagaagagtacgagcctaatttttccgacaatagtttcggttttcggcctaaacggtgcgcccatgatgccctgaagagaatagttgacaatgctaacgacggttatgagtacgtcattgatctggatctcgccaaatttttcgacaccgtgaaccatagcaaaatgatccaggttttgagcgagaccgtaaaggacggaagggtggtgagtcttgtgcacagatttttcagggccaagattaatgacgaaggcaaaattatcaaacctgccatcggtatgccgcagggcggaccactgagtcccgtctgtgctaacatactcctcaatgagctggatcagttacttgatggcaggggccatcgttatgtccgttacgcggatgacatgctcctgcagttcaggtcacttcgcgccgcagagagggtgttcacttccgtgaaaagattcattgaggagaaactcttcctcaaggtgaacgtggaaaagaccaagatatgccacctctcaaaagacgtgaagtttctgggctactccttctataaaagttatgacaaagacgacttggacgggaagggcaagtggaagctcgtagtacacggaaagaagaggagaagctttgagcagaccattaaaacactgctggataggaagtgtcctaagggcctggaaagatgtaaggaggatctgaaactctatctgtgtgggtggaccaattatttctacatggggctttccagatccagaagacagtcctatgataagtggatcagacggcggatcaggcagctgtactggaaaatttggaaaaagccttctacgagaatccgggccctgatgcagctggggatcgaacgtagcaaagctaacgagtgggggaactctagtaaggcctactggagggtggctggatcttggattctgaagcgatctctcacgaacgacgtgttgcaaaacttgggctggatatggttgggcatagcccggaagtggtcaccccagcctaggcctaagaagaaaagaaaggtgggtggttctcctaagaaaaagagaaaggtctgagaattc

SEQ ID NO: 51 - DNA, 1626 bp, synthetic construct
  source 1..1626: mol_type = other DNA; note = MG153-14_cloned_into_untethered_plasmid
gctagcgccaccatgtacccctatgatgtacctgattatgcttctggcggcagcagcggcggctcaagcggaagtgaaacacctggaacttccgaaagcgctacgcctgaatcttctggtggatcttctggcggatcttccgcatgcatggagacaagacatggcatgaaatataggcagcttcatatcgaggactacctgggagaaattcccgcagaacagggaagagggacaggggtatatgcacatgagtggatcacagggaatcctgacaccaacaccgacttttggactgataatctgcttgacgccattttgcggagcgacaacttgaacgcagcctataaacgggtcaagtctaataggggtaccgggggtatagaccgtatgcaggtggatgaactgctgccttacctgcggaatcatagagatgagttaataaggcagcttagagaggggaagtataaacctaatccggttagacgagtggaaattcctaaagaaggcaaggataaggtcaggaagttaggcatacccaccgttgtcgatcggatgatacaacaggcaattgcccaagaactcaccgccgtgtacgaggaacagttcagcgaaaacagttacgggttcagacctggtagaagcgcgcacgacgctctcgagaagtgtcgggagtatgtgaatgaggggtatatctatgcaatttcaatggacctgcaggcctattttgataccgttaaccacagtaaattgatagaagtactctcaaggaccatcaaagatggtcgcgtgatctcactgattcataaatacctgaaggcaggggttatggaagatggtggattccatgctacaagtgagggcgtaccccagggaggaccactgagccctctgtgcggtaatgtcatgctcaatgaattggacaaagaacttgagcgccgaggccacaaattcgtgagatatgctgacgattgcatagtgctgtgcaaaagcaggaaaagcgctgagaggactttaaagcatattattccttacatcacaaaaaaactctatcttaaagtcaatttagagaagacaacagttagcctggttagtaaggtgaaatacctgggatatggattctacagaaacaaaggaaagtgtcggatgcgcgtccacccaaaatccatacgcaagatgaagaatcacctcagagaacttaccgtcagaggcaataaatggtctaatcctgaacgagaagaaaaactgaggcgatataccacaggctggataaactattacaggttggccgacatgaagtccctgatggaaactaccgatgagtggcttcgacaccgtattcgcgccgtgtattggaagcagtggaagaaggtccgtacacgctacaagattttgagaaccttacatctgcccgagtggaaagtacacgaactggccaactgccgcaaggggacctggcgcgcagcctccactcttaactccgttttgaccaagaccgtaatcgtagatcggttaggttatccaagtatgacggctcactacctcaaggtaagggtcaactaccctaggcctaagaagaaaagaaaggtgggtggttctcctaagaaaaagagaaaggtctgagaattc

SEQ ID NO: 52 - DNA, 1518 bp, synthetic construct
  source 1..1518: mol_type = other DNA; note = MG153-15_cloned_into_untethered_plasmid
gctagcgccaccatgtacccctatgatgtacctgattatgcttctggcggcagcagcggcggctcaagcggaagtgaaacacctggaacttccgaaagcgctacgcctgaatcttctggtggatcttctggcggatcttccgcatgcatgtgtgaaatacgaaaggtagaaacggacatggaacttcttgaggaggttctgtctaaagataacctcaataaggcctataagcaagtgtacaagaacaaaggagcttccggagtggatggcgtaactgtggacgagctcttctcttatatacaggaacacaaagaggaaatattatggaaaattagaaacaggaaatataagcctcagccggtgagaagggtcttaatccccaaagataatggcaaaatgcggaaacttggaatcccttcagtgattgatagagtgattcagcaggcgattgtccaggtcttaacccccatttacgaagagcaattttcaaaccattcatacggctttagaccgaagcgctcctgcgagatggccgtggtacaggcactggagtacttcaacgacggatatgactggattgtggatattgaccttcaaagcttcttcgatgaggttaaccaggataagctgatcgggattattagaaggaccattaaagatggggatttggttagcctcatacgaaagttcctgcagtcaggtgtgatggaaaatggcgtcttgcagccgacaaaaaagggtactccccagggggggaacctgtccccccttctgtctaacataatgcttaacgaacttgacaaggagttagaagcgagaagactgcatttcgtcagatatgccgacgactgtctcattctcgttaagagcgaaaaagcagcgaacagggttatggagagcattacgaagttcatcacaaagaaattaggactgaaggtgaatgtcgagaaaagcaagatcgctaggccagatgatataaaatatttaggctttggtttctacaagaaaataaatcagaatgagtggcggcccaaaccccatatcaagtccgtgcagaagtttaagacaaagcttcgcgacattctggtacgttcacgtagcattagcctcgacgatcgcctcctgagattgaagcagctcatttacggatgggtgaattatttcagaatcgccgatatgaccattcttctgcgtgacatcgatggcaacatccgtcgcaagttacgtgttatcatctggaagcagtggaagaaaataaaaaaacggtacgcctgtcttcgaaaattagagattactcatagggacgcttacgtgaccgctaattcacggagtggatattaccatatctctcatacaagggtgctggagaaggccatttcaaaagagcgcttaaacaagaggggccttgtaaactcactggattactatctgaaggtgcatataatcacgaatcctaggcctaagaagaaaagaaaggtgggtggttctcctaagaaaaagagaaaggtctgagaattc

SEQ ID NO: 53 - DNA, 1602 bp, synthetic construct
  source 1..1602: mol_type = other DNA; note = MG153-16_cloned_into_untethered_plasmid
gctagcgccaccatgtacccctatgatgtacctgattatgcttctggcggcagcagcggcggctcaagcggaagtgaaacacctggaacttccgaaagcgctacgcctgaatcttctggtggatcttctggcggatcttccgcatgcatgtctaaagccatgaggcagatgcctgggcagcccggcagagtatgcgtggctcacggcgaagccgtgcgcgacctcatctcagatgaggcaggaggcccacctcgcgaacatcccgatactggctctgcaactcctccgacaggacccggggggttgctggcagcgatgctgaccagacagaacttacagttagcatggaagagagtcaaggcgaataaaggagcagctggagtggatggacttgacatcgaacagactgctcagacacttcgtactcgttggcccgatattagacagtctctgctgcaggggcggtacaggccgtctcccgttcgtaaagttatgatcccgaagccagatggaacacagcgcgagctgggtattccaacggtcactgaccgcttaatccagcaggcacttctgcaggtgctgcagcccttaatagaccccacattcagcgaacacagctatgggttcagacccggacggagggctcatgatgcggtgaaagccgcccgagcgtacgttcagtcaggaaagagagtggtcgttgatgtggatctcgccaagtttttcgatagagtgaaccatgacatattaattgatcggctcaacaggagggtggacgacgccggagttattagacttgttcgcgcttacctgaacgcaggtattatggacggaggggtcgtggtggatcgacacctgggaaccccccagggcggacccttaagtccactgttggccaatgtactgctggatgaggtggataaagctcttgaggcccgcgggtattgctttgcccggtatgcagacgactgtaatgtgtacgtgggctccaagaaagcgggagagcgggtgatggcatatccgtacctgcggaggctttatgtgaacctgaagctccagataaacgaggccaagagcgctgtcgcgtccgccttcggccggaagttcctgggttatgccttgtgggtggctaaaggcagggaagtcaagtgcaaagtggcgcagaaacccctgcagaactttaaggcgaggattcgacagttaaccagaaggagtggcggccggagcatggctcaggtcgtcgataagctccggccctacttgctcggatggaaggcatatttcgggatggcacaaaccccgggggtttggaggggactggatgagtggctgagacaccggctgcgcgccatccagctcaggcaatggaagagaccaaagactatccatagagaactgaaggctctgggggcgtcagacgacgttgcgaagcaggtggctggtaattgccaccgttggtggcgaaactcagacggtgttatcaagcgtgttttggccatagcgtactttgacagactgggagtgccacgactgagtcctaggcctaagaagaaaagaaaggtgggtggttctcctaagaaaaagagaaaggtctgagaattc

SEQ ID NO: 54 - DNA, 1563 bp, synthetic construct
  source 1..1563: mol_type = other DNA; note = MG153-17_cloned_into_untethered_plasmid
gctagcgccaccatgtacccctatgatgtacctgattatgcttctggcggcagcagcggcggctcaagcggaagtgaaacacctggaacttccgaaagcgctacgcctgaatcttctggtggatcttctggcggatcttccgcatgcatgcaacagaagacgtacagggatcccgacgctggccgccgaggcgaggctcccgatgctgggagccagggtgctgaaactgtccaggctcccacaactcgcgaaagcccaagctcaaccgcctggttaatggaggccatctgcgagccagtaaacctccgacacgccctgaagagagtcaaagccaacaaaggggcagcaggggcagacggcatgagcgtgagcgaactcccagactacttgcgccatcactggccagaactcaaagcccagcttctgagtgggtcttatcggccttcaccagtcagaagagttaccatccccaaacccgggggcggagagcgcctgctcggcatcccaactgtagtggatcgcttcattcagcaggctatgatgcaggtgctgcaagcccagtgggatgctactttctcagattctagttatgggtttcgtcccgggcgctccgcccaccaggccgtcaaacaagctcagaagtatatcgaaagtggttacagctggggagtggacttagatttagagaaattctttgaccgggtcaatcatgatgtgttaatgtctaggatcgcaaagcgagtatccgacaagcgggtgttgtctcttatcagaggctatcttaacgccggtgttatggaggcaggccttgtcatgcccgtgactgaaggcactccccaaggcggccctcttagccccttgctttcaaatctgctcctggacgacttcgataaggaactggagaaacgtggactgaagtttgccaggtatgcagatgactgtaacgtgtacgtgaaaagcgagcgcgcaggcaaccggatgatggccggactgactcattggctgaaccgtaaattgaagttgaagctgaacgccaagaagtctgctgttgcacttcctgaaacaagaaagttcctgggatacagctttagacggggtcgcaaggtatggtgcgtcgtaagccccgagtctgtcaaacgctttaagacgcgcatcagggagttgactggtcgaaataccggtaaatctctggaacagcttatcgagcctctgaagaggtacctgaccggttggaagagctattacggccttaaccaatggcagacccttatgcgcgatcttaatcggtggattaggaggcgactccgcagtgttctgtggaaacagtggaagacaggaagcaagcgcttcaaagaacttcggagacgcggggtgtctaaagatctggctgcccagacagtcggttcctgtcacaagcagtggaggataagttgctctcctgcactgagcatcgcactcccaaaccgactctttgtccgcctgggactccccgagctgcctaggcctaagaagaaaagaaaggtgggtggttctcctaagaaaaagagaaaggtctgagaattc

SEQ ID NO: 55 - DNA, 1620 bp, synthetic construct
  source 1..1620: mol_type = other DNA; note = MG153-18_cloned_into_untethered_plasmid
gctagcgccaccatgtacccctatgatgtacctgattatgcttctggcggcagcagcggcggctcaagcggaagtgaaacacctggaacttccgaaagcgctacgcctgaatcttctggtggatcttctggcggatcttccgcatgcatgaggtcacaagagggaagacggcagcagaaagctcctgagggcgcgtacttgtgggaagagatggtgaagccatggggtactactggaggaccaagcccgtcttccgctcagggaggcgcgacccctcgcggggggcagggcagtggtttgatggagcaggtggttgagaggagcaacatgctggctgcgctgcgtcgggttgaaagaaatggaggcgcaccgggagtcgacggcatacccaccgagaggctccgcgatcagattcgagccgagtggccaagaatcagggaagaacttcttgccggcacttaccgccctaaaccagttcgccgagtggaaatcccgaagcctggaggaggcaagagactgctgggtatccccacagcggtagaccgccttatccaacaagctctcctccaggtgctgactcctatctttgatcctcaatttagcgaagcctcttatggcttccgacccggcagacgggcccatgacgccgtgaggaaggccagacaatatgtcgaagagggttacgagtgggccgttgacttggatattgagaagtttttcgatcaggtgaaccatgacattttgatggcccgggtcgcgcgaaaggtgactgataagcgcgttctgactttgatccgcaggtatcttcaggcaggtgtcatggtcaacggcgtggttatcgagaccggggaaggcactcctcagggtggtcccttgagccccttactggcgaatatccttcttgatgaccttgacaaggagcttgaaaaacgggggcacaaattcgtgaggtacgcagacgactgtaatatatatgttaagagcaagcgcgctggggaacgagttatggctagtatcagaaaattcctgcaggaacggttgaagcttaaaattaacgagcagaagtctgccgtcgatcggccctggaagctgaaattcctgggtttctccatgcataaacgtaaaaccggtgaaattctcattcggcttgctccccaggctatagagcgtgttaaaggcaaaatccgggagattacagcacgaaacaagcctgtaagtatggccgagaggatcgaacgactgaatacatacttaggaggatggatcggttattttgcattggccgagacccccagcgtctttgaggagatcgaagggtggatgcgacgacggctccggatgtatttgtggaagcagtggaagcgggtccgtactcgctatcgcgaactcagagctcttggcttatctgaatgggtcgtgcaccagttcgctaacgcccgtaaaggtccctggcggatggcccacgggcctatgaatcgagccttaggcaacgcctattggcaaagccagggtcttatgtcactgaccgagcgataccagagcctgcgacaggctcctaggcctaagaagaaaagaaaggtgggtggttctcctaagaaaaagagaaaggtctgagaattc

SEQ ID NO: 56 - DNA, 1590 bp, synthetic construct
  source 1..1590: mol_type = other DNA; note = MG153-19_cloned_into_untethered_plasmid
gctagcgccaccatgtacccctatgatgtacctgattatgcttctggcggcagcagcggcggctcaagcggaagtgaaacacctggaacttccgaaagcgctacgcctgaatcttctggtggatcttctggcggatcttccgcatgcatggtgaaacctctgagactggatcggagggccgaaaggagtcctaccccctctgaaggcatgtctgaggccgttggggaaggggtctgggagcaggttttcgagagaaagaacttactgagcgctctgaagagagttgaagccaatgggggggcgccaggcgtcgatggtatgaccgtggaagccctcaggccatatttaaaagcacactggttggagttgcgggccgccctcgattccggaaactacagaccatcacccgtgcgtagagtcgaaatcggaaagcccgacgggggcgtgagattgctcggcatcccaactgtggttgacaggctgattcaacaagcaattggacaagtgttaacacccttgtttgagccagttttctccccacatagttatggcttcaggccgggtagaagagctcaggatgccgtcgaagctgcacagggatatatacgggagggatacacgtgggttgtagatattgatttggagaagttctttgatcgggtaaatcacgataaactcatggcaagagtggcaagagccgtgaaggacaaacgcgtcctcaagctgatccggcggtatttgcaatcaggtgtgatggtgaacggagttgtgatggagacagaagagggcacaccacaggggggacctctgagccccctgctcgccaacatcatgcttgatgacctcgataaagagctggagcggaggggccatagatttgtgaggtacgccgatgactgcaatatttacgtgaggaccgaacgagctggcgaacgggttatggactctgtgaggggctttttagagaaaaagctcaagctgaaagtgaatgaaaagaagagtgcagtggctcgcgccggccagaggaaattcctgggctttagttatttctataggaaaggcgaagttcttatcagggttgctgaacaagcacaacagagactgagagaaaaattacgaggacttactcgccggacacgctcaggccgcctggaagaaattatccaacagcttaaggagtatatgaggggctggatggggtatttccgtctggccgacaccccgagcgtcttcgcgggcctggaccactggcttagacggcgactgcgtcagttgctctggaagagatggaagcggggcaccacccgttggcgggagctcgtgtcactgggggtgccccgtcgcctggctggactcggcgctactgggtcaagcccctggcggatggctggcacccccgtggtgcacatggccctttccaatgctttttgggacgcccagggattatgcagtttcactgagtattaccaccagctgcatcttccacgcagaactgctggatgtggaccggcgtgccctgtggtgcctaggcctaagaagaaaagaaaggtgggtggttctcctaagaaaaagagaaaggtctgagaattc

SEQ ID NO: 57 - DNA, 1581 bp, synthetic construct
  source 1..1581: mol_type = other DNA; note = MG153-20_cloned_into_untethered_plasmid
gctagcgccaccatgtacccctatgatgtacctgattatgcttctggcggcagcagcggcggctcaagcggaagtgaaacacctggaacttccgaaagcgctacgcctgaatcttctggtggatcttctggcggatcttccgcatgcatgggtgaggtgagggtgaagcccgggggcactcctagagggcgcagcatcgaccggcaggatctgaaactcattctgcggcgggagaagtacagaatggacttaatggaacagatgctttccagagagaatatgttgcaggccctgcgcagggtggaagcaaacaaaggggcagccggtatcgactccgtatcaactaggcagctgagggcacacgtggtccagcactgggaaacaactaaggcgaaactgctggccgggacatataagccctcacccgttaggcgcgttgagatacctaagccagatggcggtgtacgactgttaggaatcccaactgtgatggatagactcatacagcaggctatccttcaggtcctgacaccaatcttcgacccaacattttctcctcattcttatggatttagacccaaacgacggggccacgatgccgttcgccaggcacaggagtatattcgggaggggtaccggtacgttgtggacattgatctggaaaagttcttcgaccgagtcaaccatgatatattgatgtcccgggtcgcccggaaggtgaaagacaagcgagtgcttaagctcattagggcatacctcaaagccggcattatggccgagggaatccgagtcagatctgaagaaggtaccccgcagggtggtcccctgtccccccttctcgccaacatcctcctggatgacctggataaggagctcgaaagaaggcaactgcggttcgtgcgttatgctgacgattgtaatatctatgtcaagacccgcagagctggggagcgcgtgaagcggtccattacaaagtacctggagaaaaaattaaaactcaaggtcaatgaagcgaagagtgccgtggaccgtccttggaagaggaaattcctcgggttctcttttacgtttcataaggaagcgcggatcaggatcgcgcctaagtccctgaaaagggtgaaagacaaaattcggagtctgacaaggggtaatcacctgacctccatggaaaccattatcgaggacttgaatagatacctgatgggttggatggggtattacgcccttatggacaccccatctacattaaaagcccttgatgagtggatccgtcggcggttgaggctggtcctttggtctcgttggaaacgcgtccgaacaaggtatcgcatgttacgggctttggggctgcccgaacgcgatgttcacaagcttgcgaatacacgcaagggcgcgtggagaacttccaaaaccccccagatgcataaagctctcggtatagcgtattggaagagccaagggctcatgtccctcaccgaacgatatttcgaaatcagacagggttggaggacagcacctaggcctaagaagaaaagaaaggtgggtggttctcctaagaaaaagagaaaggtctgagaattc

SEQ ID NO: 58 - DNA, 1572 bp, synthetic construct
  source 1..1572: mol_type = other DNA; note = MG153-21_cloned_into_untethered_plasmid
gctagcgccaccatgtacccctatgatgtacctgattatgcttctggcggcagcagcggcggctcaagcggaagtgaaacacctggaacttccgaaagcgctacgcctgaatcttctggtggatcttctggcggatcttccgcatgcatgaaggagactaagaagtgtgatgaaagtcgccagctcaacatccagacaggacacctgcaaaaagaccgcgtcgagttggagtcctacgctaaagcgcccagcattagcgtaacttctgacaacaggcagaatgcgaggcgagaatgtcactacggcctgctcgaaaatataatatcttccgagaacctgaatgaggcatttaaacgtgtcaagaaaaataaaggttctcatggggaagaattgagacaatctatcgccgacggtagctataaaccaaacccagttcgcagggtggaaatacccaaggataacggcaaaattcgcccacttgggattccaactgtagttgatcgagtgattcagcaggctatatcacaggtgcttacacctatattcgaaaagaaattttctgaaaattcttatggattccgacctaatagatccgcgcatcaggccattctcaaatgtaaggagtacatggacgaggggtaccgatgggcagtcgatatagatctggaaaaatatttcgatacggtaaatcatgacaaactgatcggattgatatataaagaaatcaaggacattcgggtgattggacttatcagaaaataccctaatgctggcgtgatggaaaaagggttgaccagtctcactctcgagggcgtcccacaaggtgggaatctttcacctcttctgagcaatataatgctgaacgagcttgatatggagcttgagcggagaggtcttcgcttctgtcgttatgctgacgactgtaacgtttacgtgaagagcaagaagagcgccgagagggttatgaagagtataacaaagtttatagaaaaagacctgaaactgaaagtaaataaggaaaaatctaaggtggacaggccatggaaactgaaatatctgggttacacgttttatacaaagaaaggcgagatgggaatccgtgtgcaccaggtatctattaagaaactgaagggaaagctcaagtcaattaccggtaggtccaacgctatgagcatggagctccgggccgttaagctgaaacagctgatcgttgggtggataggttacttcaagctggctgatatgaaaagcacgctgagggaattggatgagtggctgcgacggcgcctgcggttatgttactggaaacagtggaaaaagatcaagaccaaacatgacaatcttgttaagttgggggtcgaaaactggaaggcttgggaacacgcaaatacacggaaaggctactggaggatctctaattcccccatattagcgacgacactcaccaataagtatttgcgcgagcagggcttcatcacgctgtctgaacggtactcacaggtccgacctaggcctaagaagaaaagaaaggtgggtggttctcctaagaaaaagagaaaggtctgagaattc

SEQ ID NO: 59 - DNA, 1578 bp, synthetic construct
  source 1..1578: mol_type = other DNA; note = MG153-25_cloned_into_untethered_plasmid
gctagcgccaccatgtacccctatgatgtacctgattatgcttctggcggcagcagcggcggctcaagcggaagtgaaacacctggaacttccgaaagcgctacgcctgaatcttctggtggatcttctggcggatcttccgcatgcatgtcaatgtgtgaggccttacgccagatgcctgaaagaagtggcagggtcccgttggccgacggagaggctgggagggcatcagccagtgacgaggctacgcggccaaggcatgagacaggttccaccggcagtgcactccttatggccgcattaacaagggaaaatcttcagcaggcttggaaaagagtccgcgctaataaaggcgctgccggcgtggatgggagagatataccggagactgcttgctatcttcggacagcatggcctgtgatccgggaccagttgctgcaaggtacttaccggccctctccagtgaggcgagtaacaatccccaaaccagatggcggcgaaagggagttgggcattccaaccgttacagaccgtcttatccagcaggcccttttgcaggtcctccaaccgcttttggacccaaccttttctgaaaactcattcggattccgccccgggcggtctgcccaggaggccgtggtgcgggctcaagcatacgtgcaaagcggtcggagaattgtcgtcgacgtggatttggagaaattcttcgatagagttaaccatgatatcttgttgggtagattacagaagcgaataggtgacgccggggttcttcggctgatactcgcctacctgaactcaggtattatgcagaatggagtggtcgtgtctcggtatcaaggcaccccacagggcgggcctttgtctccactgctggccaacgtccttttggacgaggtggacaaagaactcgaaaggaggtcacactgtttcgtccggtacgctgatgacgccaatgtgtatgtgcgctcccagcgggcgggcgagcgggtcatggcattactgaggaaaatgtacgccaagttgcacttaacggttaacgaggcaaaatcagctgttgcaagcgcattcggccgcaaattcctggggttcagcttctgggtcgctccacagggcgaaataaagtgcaaggtcgcagcaaaacctatggctacttacaaacaacggatccggcagcttacgcggcgctccggcggtagaagtatggctgaagttgtggagaatctgaggccatatgtgctggggtggaaggcttacttccgcttgagccagactcccggtgtgtggcgaacactggacgagtggatgaggcatcggctgcgagctattcagttaaaacactggaaaagagggccaactatgtaccgggagctcaaggccctcggagcttccgagaccgtggccaggagagttgccggaaatgcacgttcctactggcggaatgcggataggctgctcaagacaattctgaccattgcctactttgaccgccttcgagtgcctagactgtctcctaggcctaagaagaaaagaaaggtgggtggttctcctaagaaaaagagaaaggtctgagaattc

SEQ ID NO: 60 - DNA, 1470 bp, synthetic construct
  source 1..1470: mol_type = other DNA; note = MG153-26_cloned_into_untethered_plasmid
gctagcgccaccatgtacccctatgatgtacctgattatgcttctggcggcagcagcggcggctcaagcggaagtgaaacacctggaacttccgaaagcgctacgcctgaatcttctggtggatcttctggcggatcttccgcatgcatgatgatggaacaggtggtgagtaggcagaacatgctggcagcctaccaaagagtggtccggaatcatggctccgccggagtcgatggggtgactgtggaggacttggctgagtacagccgtctccattgggagagaataaggacagaactgcttgaaggacgctatcagccacagcctgtgaggactgttatgataccgaaaccaggggggggcgaacgggagctgggaatccctactgtgatggacaggatgatacagcaggccgttcatcaagtcatgtcaccccaattcgacgctggcttttctgaagccagctacggattccggccagggcggagtgcccacggtgcagtcgagagagccagggaacacatgactgctggccataggtgggttgtagacatcgacttggagcgtttcttcgaccgagttaaccatgacgtattgatcgcccgggtttctcacactgtcaaagataagagggtactgaggcttattggctgctatttgagtgccggcttgatgcagggaggagttgtttccccacggtcagagggcacaccccagggcggaccactgtctcccctcctgtctaatatccttctggacgtactggataaagaattagaaaggagaggacaccgcttcgtccggtacgcagacgactgtaacgtgtatgtgcaatctcgaagagctggggagcgagtgatgggtagtctgcgtgtctggcttgagaagcggttgcgcctgaaaatcaatgcctccaagtccgctgtggacagaccctggcatcggaagtttttgggatatagtgtgacgacacagaaacggccccggctgaaagtgagcgctgagtcagtcaaaagaatgaaacaaaggctcagggaactcttgagaatcggccgcggacgaagtttacggacggttattgctactgtcgcggtttatttgagagggtggctcggttactacagaaaagcggaggtgagaaacgtgttcgaagacctcgaccaatggttgaggcggaaactgcggagaattatgtggaagcagtggaaaaaacctaagacaaggtaccgcaaactgcgcgcatacggtgtagccccagaccaggctaggaggtctgcttggaacggccgcggcccttggtttaacgcaggggcctcccatatgcacttggccgttccgactaagttgcttcgcaattgggggttaccctctctcttggacgaacaccagaggttacagaggttgcctaggcctaagaagaaaagaaaggtgggtggttctcctaagaaaaagagaaaggtctgagaattc

SEQ ID NO: 61 - DNA, 1665 bp, synthetic construct
  source 1..1665: mol_type = other DNA; note = MG153-27_cloned_into_untethered_plasmid
gctagcgccaccatgtacccctatgatgtacctgattatgcttctggcggcagcagcggcggctcaagcggaagtgaaacacctggaacttccgaaagcgctacgcctgaatcttctggtggatcttctggcggatcttccgcatgcatgatatcaatgcagaccgttaaggcagaggttagtgaacgggcagccgagactcaatcaactgatcggaagagtacaaaactgccgctcggagcagacgtaggagccgccacatctgaacagacaaagtctgaagggcacagcttgatggaacaggtggtagagcgctccaacctctggttggcatatcagagggtggttagaaataaaggcgcccccggcgtggacggcctcactgtgggagagttcaaagattggctgaagatgcactggcccagcgtaaaaaaagccctgctcgaaggcgactatctgccaaggccagttcgcagggtggacattccaaaggcttccggaggaatgcgcaccctcggggtgcctaccgtcgtggatcgccttattcagcaggctcttcaccaggtcctccaacccctgtttgagccaacattctcacagggatcatacggctttcgaccacggagaacagctcatcaggctgtacggagagcccagtcctacattcgtgagggcaagcggtgggttgtcgacctcgatctggagaaatttttcgaccgtgttaatcatgatgtgctgatggcccgggtggctaggcaggtgcgcgatgcacgggtcctgaagctgataagaagattcctggaagctgggatgatgagagagggcttggtggagccgagaagtgagggaaccccccaaggtggccctctgtctcccctgttgagtaatatcctgcttaccgacctcgaccgcgagctcgagcgcaggggacttgcattttgccgttacgccgatgattgtaatatctacgtagggagtagggtagccgccgaaagggttatgggtggtattcgaacatttctggaagaggtcctccgcttaaggataaatccagcaaaatccgccgttgccaggccgtgggaacggaagtttcttgggttctcattcaccgcccaacgggaggccagactgaggatagcacttcaaagcgtgagaagactgaccgaacgcgtaagggaacttctccgtgccgggcgtggccgcagtttggcccacactattgatactcttaatcctcttctgcggggatggatttcttatttccaactgacccaatgtaaaggagtgttagaagaattggacggttgggtgagacgacgccttcgttgcgtgctctggcggcagtggaaacgctctcgatctagggccagacacatgcgggcacttggactcgacgcagctcgagctcgctgtagcagtcagaacggtagagggtcttggtggaacgcgggagcatcacatctccaccaggccctgccagccgcgtacttcaagctgggcgccggcctggctgttgctagagctactgctacacccgtctgttcactgaataggagaatgcggaaccgaacaagtggcggggtgggaggtaggagagcacctaggcctaagaagaaaagaaaggtgggtggttctcctaagaaaaagagaaaggtctgagaattc

SEQ ID NO: 62 - DNA, 1005 bp, synthetic construct
  source 1..1005: mol_type = other DNA; note = MG160-1_cloned_into_untethered_plasmid
gctagcgccaccatgtacccctatgatgtacctgattatgcttctggcggcagcagcggcggctcaagcggaagtgaaacacctggaacttccgaaagcgctacgcctgaatcttctggtggatcttctggcggatcttccgcatgcatgccctacaactatgacctgtgcttcaagacccctcagaatagatggatttttgtgcccacctcagaatgtcgcgataacgggtatgagtacgtgaaactgatcaggcggaagtggacactccctaatttttactatcacttgaaggctggcggacatattgccgcattgaaactccacgagggaaacaattatttcgcaaagatcgacatcaagagcttcttcccctctatctcaaaagccaaggtgattcgagccctgaaggacattggcatcaattacaaacttgccgaactgatcgcttcctggagcaccgtaaaaagtaaagagaactccaccaagtatatcgtgccgtacggcttcgtgcagtctcagattattgcatctctgtgcctggacaagagtgctataggtagctttatcaaaaataagcttccaacggacgtcaaggtctccgtttatgttgacgatattatcctcagctctaataacccatcagcactgcaggatatctacaatcaaatcattgccacattcgacaaaacagggtttacagtcaacactgaaaaatcccatgaggtgctggatcagactactacgttcaacatagtgatgaacgctgaggatatgcaaattaccgaggataggtttactgattttgagagcgccataacacctttgaacatcaagagatccgaagcgatcataaactacgtatctagtgtttgctcaattcagagcgagaccctcaaagaacagcttaagagtatgatcgacaattccaagtgtgcgcctaggcctaagaagaaaagaaaggtgggtggttctcctaagaaaaagagaaaggtctgagaattc

SEQ ID NO: 63 - DNA, 1101 bp, synthetic construct
  source 1..1101: mol_type = other DNA; note = MG160-2_cloned_into_untethered_plasmid
gctagcgccaccatgtacccctatgatgtacctgattatgcttctggcggcagcagcggcggctcaagcggaagtgaaacacctggaacttccgaaagcgctacgcctgaatcttctggtggatcttctggcggatcttccgcatgcatgcaatggctgcggtattatgaactgtctcccggttcccagaagtatatctacataccaaccgatgagtctcgcttgataggtagtgagatcatcaacgtactgaagtaccggtggaagaaacctgagtacttttaccactttaggcaagggggacatctcagcgctattaaagtgcatttctacgacgaagaaccctgtcagttctccgtgttcgatctctccggatattatcgacagattactcgctcaaaactggtgagagtgttgaaaaaatatgtgggctatgagcaggcactcgactgggctcagaaatccaccgtgctccaaaacggcgatctggggcgaagcattccattggggttcgtgcagtctgggtttctggccagtctggtcctcgacaacagctgccttggaaagacactcagggagatcaataagacccctaatatcagaatttctgtctttgtcgacgacatcgttatcagttcacaagaccacgagttgctgtccttttactctcagaaaatcaaggaagccagtaaaaaatccaaccttacgctccagcataggaagacattttgcaacattgactcaatcaatatcttcaatctgagctacaaaagcggaagcgagattgatttttgcgccgatagggttaacaacttcaaggaaattctcgttaagaattgtgaccgcaaattcgtggtttttggtgtaattatgtacatgctgaaggtcaacgcgaagagaaccctgagcatccttgattctattgtgcaggaaaagggcatatcaaagactggcatactgggcaagttctactacgagcacaagatcaaggaaaatcagaatatcattgagacacttcggaaagtctgtttccagcctaggcctaagaagaaaagaaaggtgggtggttctcctaagaaaaagagaaaggtctgagaattc

SEQ ID NO: 64 - DNA, 981 bp, synthetic construct
  source 1..981: mol_type = other DNA; note = MG160-3_cloned_into_untethered_plasmid
gctagcgccaccatgtacccctatgatgtacctgattatgcttctggcggcagcagcggcggctcaagcggaagtgaaacacctggaacttccgaaagcgctacgcctgaatcttctggtggatcttctggcggatcttccgcatgcatgtctaattacacacccaagtggatacacaggataaccctggagaatggaaagtggatctttgttccaagccaatcatcccgattgagcgggaaagctattgtcaagaaggtaaaactggagtgggcaccacccaagtacttctatcatcttcgccgcgggggccacatcgccgctctgaatgcgcatctcgaaaacaagtatttctctcgactggatatcaagaactttttcggcagcattactgcatccaggattactcggaccctcaaaccttatttcggatacaacctgtctagggatatcgcaaaacaatctacagtgcgcatcccgggactgttggaaagaaagcttatgctgcctttcggctttatccagagtgccatcttggcttcaatctgcttggacaaaagttctctgggtatctttctgaaacggattaagagagacaagagtcttagcctctccgtttacatggacgacatactgattagctccaatgatcagcagcggctcattgaagtcactgccgagttgaagagctatttctcaaaaagtcactgggtgtccaacacgggcaaagaggtgattgctgccgattctatgacagccttcaatatcgatatgctccagtatgagatgagagtgtccgaggagaaaatgaaacagtttgcctttaacttcagcgaaaccgaaaacataaacaagaaaaagggtatctactcatacgtgaagaccgtcaatgacgggcagttgattgaccttgtgcctaggcctaagaagaaaagaaaggtgggtggttctcctaagaaaaagagaaaggtctgagaattc

SEQ ID NO: 65 - DNA, 966 bp, synthetic construct
  source 1..966: mol_type = other DNA; note = MG160-4_cloned_into_untethered_plasmid
gctagcgccaccatgtacccctatgatgtacctgattatgcttctggcggcagcagcggcggctcaagcggaagtgaaacacctggaacttccgaaagcgctacgcctgaatcttctggtggatcttctggcggatcttccgcatgcgttacccagaagtggacccatcgataccagttgaaacccggccgatgggtttttgcccccacagatgaggccaagaagtgcggtgctcacattaagcgcagcgtggcttccaggtggaaggccccaaacttctactatcacctcagaaatggcgggcacgttgcggccgtacggtcccacgaactgagccggtttttcttccgggcagatttggacgatttctttgggagagtgaaccggtctcgcgtgacccggtgccttaaaccttggttctcatacgccgaagcaagggagatggcctcagaatctgtcgtgaagcgacctggagagacagcctttgtgctgccgtatgggttcgtgcagagccctatcctcgcatccttggccctggacaagagtaaactgggtagcctgctgagatcactggacgggggccgcgatttcacggtgagcgtctatgtcgacgacatcattatctctggagacgacgaagctcaacttaaagaggtagcatcccgccttgagagagtggcgagtgaggccctgtttccactcagcagtggcaaaactcagggacccgcctctggagtgactgtttttaacatagaactgtcccatagaatgctcaggattaccgatgataggctcgcttcactgaggctcgactatcaggcgactgcatctgagcattgtaaagctggcatcgtctcctacgtatacagtgtgaatccagatcaggtcgctcaagtgacacctaggcctaagaagaaaagaaaggtgggtggttctcctaagaaaaagagaaaggtctgagaattc

SEQ ID NO: 66 - DNA, 906 bp, synthetic construct
  source 1..906: mol_type = other DNA; note = MG160-5_cloned_into_untethered_plasmid
gctagcgccaccatgtacccctatgatgtacctgattatgcttctggcggcagcagcggcggctcaagcggaagtgaaacacctggaacttccgaaagcgctacgcctgaatcttctggtggatcttctggcggatcttccgcatgcatgcagtggagcagctactacgagctgacccccgggagcaaaaaatacatctacatacccacagaacagtctcgagaactggggaaacttattattgagacaattagaaagcggtggactccgcccgcctacttttttcatctgcgcaaaggtggtcaccttgccgctatcaagcatcatatcgacaaaagttgtaagccacgcaaattctccgtatttgacattagcggatattttggccaggtcactgaaaataagcttagaagggtgcttaaaaatttcgtgtccttcaaagaggcttctcagtgggcttatgattccacggtcaggaagccttcagaggatcggagaaccctgccttatggattcctgcaaagcggcgacctcgcctctctggttctggacaggagttatctcggctgtgagtttcggaagatacaccagaatccaaatatcaaactctccgtgttcgtggatgacataattgcatcatcaagtgatcctattctgttggaagaggcatccaacagcatcatcaatgccgcgaagctttcaaacttcaagtttaaccaggacaagatccgatgcaatgttgatgaaattgagatctttaacatccactgcagtcaggatttcgggttgagcttctctcaagagaagttgaagaaaaactctaccaactccaagaagctccctaggcctaagaagaaaagaaaggtgggtggttctcctaagaaaaagagaaaggtctgagaattc

SEQ ID NO: 67 - DNA, 1092 bp, synthetic construct
  source 1..1092: mol_type = other DNA; note = MG160-6_cloned_into_untethered_plasmid
gctagcgccaccatgtacccctatgatgtacctgattatgcttctggcggcagcagcggcggctcaagcggaagtgaaacacctggaacttccgaaagcgctacgcctgaatcttctggtggatcttctggcggatcttccgcatgcatgttgattgacaagttttcaaaggaaataggtctgcccagaccaagcgtgcagaaaattgccgccagcgcaaactatctctacaaacactacactataccgaagaggtcagggggagaaagggatatctaccacccgacacctcgcctgaaactcgtgcagcgatggattacccggcatgtgattagagaccttcctgtgtccgacgcagcaatggcttacaggaaagggaaaagtattacagacaacgccagacttcatgccggcaagaggtttctgctgaagatggatttcactgacttcttcccctcaattaaggcccgggatctgcaacccatcctgactagccggggatacgatccagaggatgtgaatttcatcttgaccatctgcttcaaaagtgggtcccttaccataggcgccccttcctctcctgctgtatctaacatcgttatgtttgcccttgaccaggagtttaagggaatcgcagatcgaaggaagctcacctatagtcgctatgctgatgacctcacattcgctggcaatgtacgggggaatttgatcgaggcgaagaaagacgttgagagactcattggtacatgggcctcaccaaacctgaccttgaaccagcgcaaaaccgtcctggtctcttccgcacacagacaaaaagttactggtattacgcttactacggacggcgagatatccatcggacgagagaagaagagggaactccgggctatcgtccatcgcagcacatatcagaaactggagcccgaggtggaagcttacgtccagggctggctggcgtacgccaatagcatcgaaccaaagtttgtggattctctgcgcaagaagttcgacacctatcttgattttcctaggcctaagaagaaaagaaaggtgggtggttctcctaagaaaaagagaaaggtctgagaattc

SEQ ID NO: 68 - DNA, 966 bp, synthetic construct
  source 1..966: mol_type = other DNA; note = MG160-8_cloned_into_untethered_plasmid
gctagcgccaccatgtacccctatgatgtacctgattatgcttctggcggcagcagcggcggctcaagcggaagtgaaacacctggaacttccgaaagcgctacgcctgaatcttctggtggatcttctggcggatcttccgcatgcatgccgatcaatttcaagtttgcctatgagtgcaaaggcaagagaatttttgtgcccaacgatgagtgcgtacgccgaggcgaagcccttattaagtactgctcccaggcagtcgatttcccaagctacttttatcactaccgagctgggggtcacgtcgccgctctgcatagacacctggaacacaggtttttcttccgcatcgacatcgaaaacttcttctactccataagtcgcaaccgggtgagcgcagtcctgcaccatataggctttagaaaagctcgaccctacgctgagtggtcttgtgttaaaaacccatttggtgcccccgcctattctctgccaataggcttcgtgcagagccctatgctcgcttcactggcaattctccggtcccctgtggccgcagccatcgaaagggcggcagccgctggagcgtttgtgagtgtgtactttgatgatttcatcggaagcgctgttgaccgggagcccctcgagaaagccttccaagacattcttcattcatgccaagaagcaaaccttatttccaatcagctcaagctggctaaaccttctgaacatatcttggcctttaattgtgacttgtctcacgggatcgccgaggttgccgaggccagggtggctaagttctttaaggcccctagatcacagtgggcagaggcggcgttccgggagtattgtaatcgggtagcaagaaataaccataagagtgaagggcgcaggttcctgaggcctaggcctaagaagaaaagaaaggtgggtggttctcctaagaaaaagagaaaggtctgagaattc

SEQ ID NO: 69 - DNA, 5055 bp, synthetic construct
  source 1..5055: mol_type = other DNA; note = MG160-1__cloned_into_tethered_plasmid
atgaagaggaccgctgatggttccgaatttgaatctcctaagaagaaacgaaaggttgataagaaatatagtattgggttggatattggtacgaatagtgtaggatgggcggttattactgacgaatataaagtcccctctaagaagtttaaagtcctcggtaatacagataggcatagtattaagaagaatcttattggcgctctcttatttgattccggtgagactgctgaagctacaaggttaaagaggactgctcgccggcgctatacacgaaggaagaatcgcatatgttaccttcaggaaatatttagtaatgaaatggcaaaagtcgatgattcattcttccatcgacttgaggaatcatttctcgttgaggaagacaagaagcatgaaaggcatccaatctttggaaatatagtcgatgaagtagcttatcatgagaaatatccgactatttatcatttgcgaaagaagcttgtcgattctacagataaagcggatcttaggcttatatacctcgcactcgctcatatgattaaatttaggggtcattttctgattgaaggggatctcaatcctgataattccgatgtagataagctctttattcaacttgtacaaacatataatcaattatttgaagagaatcctattaatgcttctggagtcgatgcaaaagcgattttgagcgctcgcctttccaaaagtcgcagacttgagaacttgattgctcaactcccaggtgaaaagaagaacggactctttggtaatttgatcgcattgagtcttgggttgactccaaattttaaaagtaattttgatttggctgaagacgcaaagctccaattgtccaaagatacttatgatgatgatttggataatttattagcccaaattggagatcaatatgctgatctcttcctcgcagctaagaatctctcagatgcaattttgttgtctgatatacttcgcgtaaatactgaaattacaaaagctcctctctccgcaagcatgataaaacggtatgatgaacatcatcaagatcttactcttcttaaggccttagtacgccaacaacttccggagaaatataaggaaatcttctttgatcaatcaaagaatgggtatgcagggtatatagatggcggcgcgtcacaagaggaattttataaatttataaaaccgattcttgagaaaatggatggaacagaagagcttttggtcaaattaaatagggaagatttgttgaggaaacaaagaacctttgataatgggtctattccacatcaaatacatcttggcgaattgcacgcgatactcaggcgacaagaggacttctatccttttcttaaagataatcgcgagaaaattgaaaagattctcacgtttcggattccttattatgttggaccgttagcgcggggtaattcacggtttgcttggatgactaggaaatcagaagagactattacgccttggaattttgaagaggttgtcgataaaggagcctcagctcaatcttttattgaacgaatgactaattttgacaagaatctccctaatgaaaaggtcttgcctaaacatagtcttctctatgaatattttacagtctacaatgaattgacaaaggttaagtatgtcacagaaggtatgaggaaacctgcatttctgagtggggaacaaaagaaagcgattgtcgatctcctctttaaaacgaatagaaaggtcacggtaaaacaattaaaggaagattattttaagaagattgaatgttttgattcagtcgagatatctggggtcgaggacagatttaatgcaagcttgggtacctatcatgacttgctcaagatcattaaagataaagattttctcgataacgaagagaatgaagatatccttgaggacatagtccttactctcaccctcttcgaagatcgggaaatgattgaagagcgccttaagacatacgcacatctctttgatgataaggttatgaaacaactcaaacgccgacggtatacaggatggggaagacttagtcgcaaactcataaatggaataagggataaacaatcaggaaagaccattcttgactttcttaaatctgatggatttgcaaatcgcaatttcatgcaactcattcatgatgattccctcacattcaaggaagatatacaaaaggcacaagtcagtgggcaaggggactcccttcatgaacatatcgcaaaccttgctggttctcctgcaatcaagaagggaatactccaaactgtaaaagtcgtcgatgaacttgttaaggtaatgggacgccataaaccggaaaatattgtaatagagatggcgcgagaaaatcaaacgactcaaaagggccagaagaatagcagagaaaggatgaaacgcatagaggaagggataaaggaattggggtcccaaattttgaaggagcatccagtagagaatactcaattgcaaaatgagaaactctatctttattatctccaaaacggcagggacatgtatgtcgatcaagagttagatataaatcgccttagtgattatgacgtagatgcaattgtcccccaatccttccttaaagatgatagtattgataataaagtcttgactaggagtgataagaatcgcgggaaaagtgataatgtaccatctgaggaagtagtaaagaaaatgaagaattattggcgacaactcctcaatgcaaaattgatcacgcaacgaaaatttgataacttgacgaaagctgaacggggcggactctccgagcttgacaaagcagggtttattaaacgccaattggtcgagactagacaaattacgaaacatgttgctcaaattcttgatagcagaatgaataccaaatatgatgaaaacgataaattgattcgagaggtcaaggtaattacactcaaatcaaaattagtctctgactttaggaaagactttcaattctataaggtaagggaaattaataattatcatcatgcgcatgatgcatatttgaatgctgtggtcggcacagcgttgattaagaaatatcccaaattagagtcagaatttgtttatggagattataaagtctatgatgttaggaaaatgattgcaaagtctgagcaagagattgggaaagcgacagcaaaatatttcttttatagtaatattatgaacttctttaaaacggaaatcactctcgctaatggggaaattcgcaaaagaccccttattgaaactaatggtgagacaggcgaaattgtttgggacaaaggacgtgacttcgctacagtccgcaaggttctttctatgccacaggtaaacattgttaagaaaactgaagtccaaactggcggtttctccaaggaaagcattctccctaaacgcaatagtgacaaattgattgcaaggaagaaggattgggatccaaagaaatatggtgggtttgattcaccgacagttgcgtacagtgtccttgttgtagctaaggtagagaaaggaaaatccaagaagcttaaatcagttaaggaattattaggcattacaattatggagaggtccagttttgagaagaacccgatagatttcttagaggctaaagggtacaaagaggttaagaaagatcttattataaaacttccaaaatatagtctctttgaactggagaatggacgaaaacgaatgcttgcaagtgctggagagttacaaaagggcaatgagctcgctttaccaagcaagtacgtaaattttctctatcttgcatcccattacgaaaagttgaaaggtagtccagaagacaacgaacaaaagcaattattcgtagagcaacataaacattatcttgatgaaattattgaacagattagtgaattttcaaaacgcgttatactcgcagatgccaacttagataaggtactctctgcttataataaacatagggacaaacctatacgagaacaagcggaaaacattattcatttgttcacactcactaacctcggcgctccagctgcttttaaatatttcgatactacaatagatagaaaacgttatacttctacaaaggaagtcttagatgctacactcattcatcaaagtattacaggattatatgaaactcgtatagatctctcacaactcggcggggattctggcggcagcagcggcggctcaagcggaagtgaaacacctggaacttccgaaagcgctacgcctgaatcttctggtggatcttctggcggatcttccgcatgcatgccctacaactatgacctgtgcttcaagacccctcagaatagatggatttttgtgcccacctcagaatgtcgcgataacgggtatgagtacgtgaaactgatcaggcggaagtggacactccctaatttttactatcacttgaaggctggcggacatattgccgcattgaaactccacgagggaaacaattatttcgcaaagatcgacatcaagagcttcttcccctctatctcaaaagccaaggtgattcgagccctgaaggacattggcatcaattacaaacttgccgaactgatcgcttcctggagcaccgtaaaaagtaaagagaactccaccaagtatatcgtgccgtacggcttcgtgcagtctcagattattgcatctctgtgcctggacaagagtgctataggtagctttatcaaaaataagcttccaacggacgtcaaggtctccgtttatgttgacgatattatcctcagctctaataacccatcagcactgcaggatatctacaatcaaatcattgccacattcgacaaaacagggtttacagtcaacactgaaaaatcccatgaggtgctggatcagactactacgttcaacatagtgatgaacgctgaggatatgcaaattaccgaggataggtttactgattttgagagcgccataacacctttgaacatcaagagatccgaagcgatcataaactacgtatctagtgtttgctcaattcagagcgagaccctcaaagaacagcttaagagtatgatcgacaattccaagtgtgcg

SEQ ID NO: 70 - DNA, 5151 bp, synthetic construct
  source 1..5151: mol_type = other DNA; note = MG160-2_cloned_into_tethered_plasmid
atgaagaggaccgctgatggttccgaatttgaatctcctaagaagaaacgaaaggttgataagaaatatagtattgggttggatattggtacgaatagtgtaggatgggcggttattactgacgaatataaagtcccctctaagaagtttaaagtcctcggtaatacagataggcatagtattaagaagaatcttattggcgctctcttatttgattccggtgagactgctgaagctacaaggttaaagaggactgctcgccggcgctatacacgaaggaagaatcgcatatgttaccttcaggaaatatttagtaatgaaatggcaaaagtcgatgattcattcttccatcgacttgaggaatcatttctcgttgaggaagacaagaagcatgaaaggcatccaatctttggaaatatagtcgatgaagtagcttatcatgagaaatatccgactatttatcatttgcgaaagaagcttgtcgattctacagataaagcggatcttaggcttatatacctcgcactcgctcatatgattaaatttaggggtcattttctgattgaaggggatctcaatcctgataattccgatgtagataagctctttattcaacttgtacaaacatataatcaattatttgaagagaatcctattaatgcttctggagtcgatgcaaaagcgattttgagcgctcgcctttccaaaagtcgcagacttgagaacttgattgctcaactcccaggtgaaaagaagaacggactctttggtaatttgatcgcattgagtcttgggttgactccaaattttaaaagtaattttgatttggctgaagacgcaaagctccaattgtccaaagatacttatgatgatgatttggataatttattagcccaaattggagatcaatatgctgatctcttcctcgcagctaagaatctctcagatgcaattttgttgtctgatatacttcgcgtaaatactgaaattacaaaagctcctctctccgcaagcatgataaaacggtatgatgaacatcatcaagatcttactcttcttaaggccttagtacgccaacaacttccggagaaatataaggaaatcttctttgatcaatcaaagaatgggtatgcagggtatatagatggcggcgcgtcacaagaggaattttataaatttataaaaccgattcttgagaaaatggatggaacagaagagcttttggtcaaattaaatagggaagatttgttgaggaaacaaagaacctttgataatgggtctattccacatcaaatacatcttggcgaattgcacgcgatactcaggcgacaagaggacttctatccttttcttaaagataatcgcgagaaaattgaaaagattctcacgtttcggattccttattatgttggaccgttagcgcggggtaattcacggtttgcttggatgactaggaaatcagaagagactattacgccttggaattttgaagaggttgtcgataaaggagcctcagctcaatcttttattgaacgaatgactaattttgacaagaatctccctaatgaaaaggtcttgcctaaacatagtcttctctatgaatattttacagtctacaatgaattgacaaaggttaagtatgtcacagaaggtatgaggaaacctgcatttctgagtggggaacaaaagaaagcgattgtcgatctcctctttaaaacgaatagaaaggtcacggtaaaacaattaaaggaagattattttaagaagattgaatgttttgattcagtcgagatatctggggtcgaggacagatttaatgcaagcttgggtacctatcatgacttgctcaagatcattaaagataaagattttctcgataacgaagagaatgaagatatccttgaggacatagtccttactctcaccctcttcgaagatcgggaaatgattgaagagcgccttaagacatacgcacatctctttgatgataaggttatgaaacaactcaaacgccgacggtatacaggatggggaagacttagtcgcaaactcataaatggaataagggataaacaatcaggaaagaccattcttgactttcttaaatctgatggatttgcaaatcgcaatttcatgcaactcattcatgatgattccctcacattcaaggaagatatacaaaaggcacaagtcagtgggcaaggggactcccttcatgaacatatcgcaaaccttgctggttctcctgcaatcaagaagggaatactccaaactgtaaaagtcgtcgatgaacttgttaaggtaatgggacgccataaaccggaaaatattgtaatagagatggcgcgagaaaatcaaacgactcaaaagggccagaagaatagcagagaaaggatgaaacgcatagaggaagggataaaggaattggggtcccaaattttgaaggagcatccagtagagaatactcaattgcaaaatgagaaactctatctttattatctccaaaacggcagggacatgtatgtcgatcaagagttagatataaatcgccttagtgattatgacgtagatgcaattgtcccccaatccttccttaaagatgatagtattgataataaagtcttgactaggagtgataagaatcgcgggaaaagtgataatgtaccatctgaggaagtagtaaagaaaatgaagaattattggcgacaactcctcaatgcaaaattgatcacgcaacgaaaatttgataacttgacgaaagctgaacggggcggactctccgagcttgacaaagcagggtttattaaacgccaattggtcgagactagacaaattacgaaacatgttgctcaaattcttgatagcagaatgaataccaaatatgatgaaaacgataaattgattcgagaggtcaaggtaattacactcaaatcaaaattagtctctgactttaggaaagactttcaattctataaggtaagggaaattaataattatcatcatgcgcatgatgcatatttgaatgctgtggtcggcacagcgttgattaagaaatatcccaaattagagtcagaatttgtttatggagattataaagtctatgatgttaggaaaatgattgcaaagtctgagcaagagattgggaaagcgacagcaaaatatttcttttatagtaatattatgaacttctttaaaacggaaatcactctcgctaatggggaaattcgcaaaagaccccttattgaaactaatggtgagacaggcgaaattgtttgggacaaaggacgtgacttcgctacagtccgcaaggttctttctatgccacaggtaaacattgttaagaaaactgaagtccaaactggcggtttctccaaggaaagcattctccctaaacgcaatagtgacaaattgattgcaaggaagaaggattgggatccaaagaaatatggtgggtttgattcaccgacagttgcgtacagtgtccttgttgtagctaaggtagagaaaggaaaatccaagaagcttaaatcagttaaggaattattaggcattacaattatggagaggtccagttttgagaagaacccgatagatttcttagaggctaaagggtacaaagaggttaagaaagatcttattataaaacttccaaaatatagtctctttgaactggagaatggacgaaaacgaatgcttgcaagtgctggagagttacaaaagggcaatgagctcgctttaccaagcaagtacgtaaattttctctatcttgcatcccattacgaaaagttgaaaggtagtccagaagacaacgaacaaaagcaattattcgtagagcaacataaacattatcttgatgaaattattgaacagattagtgaattttcaaaacgcgttatactcgcagatgccaacttagataaggtactctctgcttataataaacatagggacaaacctatacgagaacaagcggaaaacattattcatttgttcacactcactaacctcggcgctccagctgcttttaaatatttcgatactacaatagatagaaaacgttatacttctacaaaggaagtcttagatgctacactcattcatcaaagtattacaggattatatgaaactcgtatagatctctcacaactcggcggggattctggcggcagcagcggcggctcaagcggaagtgaaacacctggaacttccgaaagcgctacgcctgaatcttctggtggatcttctggcggatcttccgcatgcatgcaatggctgcggtattatgaactgtctcccggttcccagaagtatatctacataccaaccgatgagtctcgcttgataggtagtgagatcatcaacgtactgaagtaccggtggaagaaacctgagtacttttaccactttaggcaagggggacatctcagcgctattaaagtgcatttctacgacgaagaaccctgtcagttctccgtgttcgatctctccggatattatcgacagattactcgctcaaaactggtgagagtgttgaaaaaatatgtgggctatgagcaggcactcgactgggctcagaaatccaccgtgctccaaaacggcgatctggggcgaagcattccattggggttcgtgcagtctgggtttctggccagtctggtcctcgacaacagctgccttggaaagacactcagggagatcaataagacccctaatatcagaatttctgtctttgtcgacgacatcgttatcagttcacaagaccacgagttgctgtccttttactctcagaaaatcaaggaagccagtaaaaaatccaaccttacgctccagcataggaagacattttgcaacattgactcaatcaatatcttcaatctgagctacaaaagcggaagcgagattgatttttgcgccgatagggttaacaacttcaaggaaattctcgttaagaattgtgaccgcaaattcgtggtttttggtgtaattatgtacatgctgaaggtcaacgcgaagagaaccctgagcatccttgattctattgtgcaggaaaagggcatatcaaagactggcatactgggcaagttctactacgagcacaagatcaaggaaaatcagaatatcattgagacacttcggaaagtctgtttccag

SEQ ID NO: 71 - DNA, 5031 bp, synthetic construct
  source 1..5031: mol_type = other DNA; note = MG160-3_cloned_into_tethered_plasmid
atgaagaggaccgctgatggttccgaatttgaatctcctaagaagaaacgaaaggttgataagaaatatagtattgggttggatattggtacgaatagtgtaggatgggcggttattactgacgaatataaagtcccctctaagaagtttaaagtcctcggtaatacagataggcatagtattaagaagaatcttattggcgctctcttatttgattccggtgagactgctgaagctacaaggttaaagaggactgctcgccggcgctatacacgaaggaagaatcgcatatgttaccttcaggaaatatttagtaatgaaatggcaaaagtcgatgattcattcttccatcgacttgaggaatcatttctcgttgaggaagacaagaagcatgaaaggcatccaatctttggaaatatagtcgatgaagtagcttatcatgagaaatatccgactatttatcatttgcgaaagaagcttgtcgattctacagataaagcggatcttaggcttatatacctcgcactcgctcatatgattaaatttaggggtcattttctgattgaaggggatctcaatcctgataattccgatgtagataagctctttattcaacttgtacaaacatataatcaattatttgaagagaatcctattaatgcttctggagtcgatgcaaaagcgattttgagcgctcgcctttccaaaagtcgcagacttgagaacttgattgctcaactcccaggtgaaaagaagaacggactctttggtaatttgatcgcattgagtcttgggttgactccaaattttaaaagtaattttgatttggctgaagacgcaaagctccaattgtccaaagatacttatgatgatgatttggataatttattagcccaaattggagatcaatatgctgatctcttcctcgcagctaagaatctctcagatgcaattttgttgtctgatatacttcgcgtaaatactgaaattacaaaagctcctctctccgcaagcatgataaaacggtatgatgaacatcatcaagatcttactcttcttaaggccttagtacgccaacaacttccggagaaatataaggaaatcttctttgatcaatcaaagaatgggtatgcagggtatatagatggcggcgcgtcacaagaggaattttataaatttataaaaccgattcttgagaaaatggatggaacagaagagcttttggtcaaattaaatagggaagatttgttgaggaaacaaagaacctttgataatgggtctattccacatcaaatacatcttggcgaattgcacgcgatactcaggcgacaagaggacttctatccttttcttaaagataatcgcgagaaaattgaaaagattctcacgtttcggattccttattatgttggaccgttagcgcggggtaattcacggtttgcttggatgactaggaaatcagaagagactattacgccttggaattttgaagaggttgtcgataaaggagcctcagctcaatcttttattgaacgaatgactaattttgacaagaatctccctaatgaaaaggtcttgcctaaacatagtcttctctatgaatattttacagtctacaatgaattgacaaaggttaagtatgtcacagaaggtatgaggaaacctgcatttctgagtggggaacaaaagaaagcgattgtcgatctcctctttaaaacgaatagaaaggtcacggtaaaacaattaaaggaagattattttaagaagattgaatgttttgattcagtcgagatatctggggtcgaggacagatttaatgcaagcttgggtacctatcatgacttgctcaagatcattaaagataaagattttctcgataacgaagagaatgaagatatccttgaggacatagtccttactctcaccctcttcgaagatcgggaaatgattgaagagcgccttaagacatacgcacatctctttgatgataaggttatgaaacaactcaaacgccgacggtatacaggatggggaagacttagtcgcaaactcataaatggaataagggataaacaatcaggaaagaccattcttgactttcttaaatctgatggatttgcaaatcgcaatttcatgcaactcattcatgatgattccctcacattcaaggaagatatacaaaaggcacaagtcagtgggcaaggggactcccttcatgaacatatcgcaaaccttgctggttctcctgcaatcaagaagggaatactccaaactgtaaaagtcgtcgatgaacttgttaaggtaatgggacgccataaaccggaaaatattgtaatagagatggcgcgagaaaatcaaacgactcaaaagggccagaagaatagcagagaaaggatgaaacgcatagaggaagggataaaggaattggggtcccaaattttgaaggagcatccagtagagaatactcaattgcaaaatgagaaactctatctttattatctccaaaacggcagggacatgtatgtcgatcaagagttagatataaatcgccttagtgattatgacgtagatgcaattgtcccccaatccttccttaaagatgatagtattgataataaagtcttgactaggagtgataagaatcgcgggaaaagtgataatgtaccatctgaggaagtagtaaagaaaatgaagaattattggcgacaactcctcaatgcaaaattgatcacgcaacgaaaatttgataacttgacgaaagctgaacggggcggactctccgagcttgacaaagcagggtttattaaacgccaattggtcgagactagacaaattacgaaacatgttgctcaaattcttgatagcagaatgaataccaaatatgatgaaaacgataaattgattcgagaggtcaaggtaattacactcaaatcaaaattagtctctgactttaggaaagactttcaattctataaggtaagggaaattaataattatcatcatgcgcatgatgcatatttgaatgctgtggtcggcacagcgttgattaagaaatatcccaaattagagtcagaatttgtttatggagattataaagtctatgatgttaggaaaatgattgcaaagtctgagcaagagattgggaaagcgacagcaaaatatttcttttatagtaatattatgaacttctttaaaacggaaatcactctcgctaatggggaaattcgcaaaagaccccttattgaaactaatggtgagacaggcgaaattgtttgggacaaaggacgtgacttcgctacagtccgcaaggttctttctatgccacaggtaaacattgttaagaaaactgaagtccaaactggcggtttctccaaggaaagcattctccctaaacgcaatagtgacaaattgattgcaaggaagaaggattgggatccaaagaaatatggtgggtttgattcaccgacagttgcgtacagtgtccttgttgtagctaaggtagagaaaggaaaatccaagaagcttaaatcagttaaggaattattaggcattacaattatggagaggtccagttttgagaagaacccgatagatttcttagaggctaaagggtacaaagaggttaagaaagatcttattataaaacttccaaaatatagtctctttgaactggagaatggacgaaaacgaatgcttgcaagtgctggagagttacaaaagggcaatgagctcgctttaccaagcaagtacgtaaattttctctatcttgcatcccattacgaaaagttgaaaggtagtccagaagacaacgaacaaaagcaattattcgtagagcaacataaacattatcttgatgaaattattgaacagattagtgaattttcaaaacgcgttatactcgcagatgccaacttagataaggtactctctgcttataataaacatagggacaaacctatacgagaacaagcggaaaacattattcatttgttcacactcactaacctcggcgctccagctgcttttaaatatttcgatactacaatagatagaaaacgttatacttctacaaaggaagtcttagatgctacactcattcatcaaagtattacaggattatatgaaactcgtatagatctctcacaactcggcggggattctggcggcagcagcggcggctcaagcggaagtgaaacacctggaacttccgaaagcgctacgcctgaatcttctggtggatcttctggcggatcttccgcatgcatgtctaattacacacccaagtggatacacaggataaccctggagaatggaaagtggatctttgttccaagccaatcatcccgattgagcgggaaagctattgtcaagaaggtaaaactggagtgggcaccacccaagtacttctatcatcttcgccgcgggggccacatcgccgctctgaatgcgcatctcgaaaacaagtatttctctcgactggatatcaagaactttttcggcagcattactgcatccaggattactcggaccctcaaaccttatttcggatacaacctgtctagggatatcgcaaaacaatctacagtgcgcatcccgggactgttggaaagaaagcttatgctgcctttcggctttatccagagtgccatcttggcttcaatctgcttggacaaaagttctctgggtatctttctgaaacggattaagagagacaagagtcttagcctctccgtttacatggacgacatactgattagctccaatgatcagcagcggctcattgaagtcactgccgagttgaagagctatttctcaaaaagtcactgggtgtccaacacgggcaaagaggtgattgctgccgattctatgacagccttcaatatcgatatgctccagtatgagatgagagtgtccgaggagaaaatgaaacagtttgcctttaacttcagcgaaaccgaaaacataaacaagaaaaagggtatctactcatacgtgaagaccgtcaatgacgggcagttgattgaccttgtg

SEQ ID NO: 72 - DNA, 5163 bp, synthetic construct
  source 1..5163: mol_type = other DNA; note = MG160-4_cloned_into_tethered_plasmid
atgaagaggaccgctgatggttccgaatttgaatctcctaagaagaaacgaaaggttgataagaaatatagtattgggttggatattggtacgaatagtgtaggatgggcggttattactgacgaatataaagtcccctctaagaagtttaaagtcctcggtaatacagataggcatagtattaagaagaatcttattggcgctctcttatttgattccggtgagactgctgaagctacaaggttaaagaggactgctcgccggcgctatacacgaaggaagaatcgcatatgttaccttcaggaaatatttagtaatgaaatggcaaaagtcgatgattcattcttccatcgacttgaggaatcatttctcgttgaggaagacaagaagcatgaaaggcatccaatctttggaaatatagtcgatgaagtagcttatcatgagaaatatccgactatttatcatttgcgaaagaagcttgtcgattctacagataaagcggatcttaggcttatatacctcgcactcgctcatatgattaaatttaggggtcattttctgattgaaggggatctcaatcctgataattccgatgtagataagctctttattcaacttgtacaaacatataatcaattatttgaagagaatcctattaatgcttctggagtcgatgcaaaagcgattttgagcgctcgcctttccaaaagtcgcagacttgagaacttgattgctcaactcccaggtgaaaagaagaacggactctttggtaatttgatcgcattgagtcttgggttgactccaaattttaaaagtaattttgatttggctgaagacgcaaagctccaattgtccaaagatacttatgatgatgatttggataatttattagcccaaattggagatcaatatgctgatctcttcctcgcagctaagaatctctcagatgcaattttgttgtctgatatacttcgcgtaaatactgaaattacaaaagctcctctctccgcaagcatgataaaacggtatgatgaacatcatcaagatcttactcttcttaaggccttagtacgccaacaacttccggagaaatataaggaaatcttctttgatcaatcaaagaatgggtatgcagggtatatagatggcggcgcgtcacaagaggaattttataaatttataaaaccgattcttgagaaaatggatggaacagaagagcttttggtcaaattaaatagggaagatttgttgaggaaacaaagaacctttgataatgggtctattccacatcaaatacatcttggcgaattgcacgcgatactcaggcgacaagaggacttctatccttttcttaaagataatcgcgagaaaattgaaaagattctcacgtttcggattccttattatgttggaccgttagcgcggggtaattcacggtttgcttggatgactaggaaatcagaagagactattacgccttggaattttgaagaggttgtcgataaaggagcctcagctcaatcttttattgaacgaatgactaattttgacaagaatctccctaatgaaaaggtcttgcctaaacatagtcttctctatgaatattttacagtctacaatgaattgacaaaggttaagtatgtcacagaaggtatgaggaaacctgcatttctgagtggggaacaaaagaaagcgattgtcgatctcctctttaaaacgaatagaaaggtcacggtaaaacaattaaaggaagattattttaagaagattgaatgttttgattcagtcgagatatctggggtcgaggacagatttaatgcaagcttgggtacctatcatgacttgctcaagatcattaaagataaagattttctcgataacgaagagaatgaagatatccttgaggacatagtccttactctcaccctcttcgaagatcgggaaatgattgaagagcgccttaagacatacgcacatctctttgatgataaggttatgaaacaactcaaacgccgacggtatacaggatggggaagacttagtcgcaaactcataaatggaataagggataaacaatcaggaaagaccattcttgactttcttaaatctgatggatttgcaaatcgcaatttcatgcaactcattcatgatgattccctcacattcaaggaagatatacaaaaggcacaagtcagtgggcaaggggactcccttcatgaacatatcgcaaaccttgctggttctcctgcaatcaagaagggaatactccaaactgtaaaagtcgtcgatgaacttgttaaggtaatgggacgccataaaccggaaaatattgtaatagagatggcgcgagaaaatcaaacgactcaaaagggccagaagaatagcagagaaaggatgaaacgcatagaggaagggataaaggaattggggtcccaaattttgaaggagcatccagtagagaatactcaattgcaaaatgagaaactctatctttattatctccaaaacggcagggacatgtatgtcgatcaagagttagatataaatcgccttagtgattatgacgtagatgcaattgtcccccaatccttccttaaagatgatagtattgataataaagtcttgactaggagtgataagaatcgcgggaaaagtgataatgtaccatctgaggaagtagtaaagaaaatgaagaattattggcgacaactcctcaatgcaaaattgatcacgcaacgaaaatttgataacttgacgaaagctgaacggggcggactctccgagcttgacaaagcagggtttattaaacgccaattggtcgagactagacaaattacgaaacatgttgctcaaattcttgatagcagaatgaataccaaatatgatgaaaacgataaattgattcgagaggtcaaggtaattacactcaaatcaaaattagtctctgactttaggaaagactttcaattctataaggtaagggaaattaataattatcatcatgcgcatgatgcatatttgaatgctgtggtcggcacagcgttgattaagaaatatcccaaattagagtcagaatttgtttatggagattataaagtctatgatgttaggaaaatgattgcaaagtctgagcaagagattgggaaagcgacagcaaaatatttcttttatagtaatattatgaacttctttaaaacggaaatcactctcgctaatggggaaattcgcaaaagaccccttattgaaactaatggtgagacaggcgaaattgtttgggacaaaggacgtgacttcgctacagtccgcaaggttctttctatgccacaggtaaacattgttaagaaaactgaagtccaaactggcggtttctccaaggaaagcattctccctaaacgcaatagtgacaaattgattgcaaggaagaaggattgggatccaaagaaatatggtgggtttgattcaccgacagttgcgtacagtgtccttgttgtagctaaggtagagaaaggaaaatccaagaagcttaaatcagttaaggaattattaggcattacaattatggagaggtccagttttgagaagaacccgatagatttcttagaggctaaagggtacaaagaggttaagaaagatcttattataaaacttccaaaatatagtctctttgaactggagaatggacgaaaacgaatgcttgcaagtgctggagagttacaaaagggcaatgagctcgctttaccaagcaagtacgtaaattttctctatcttgcatcccattacgaaaagttgaaaggtagtccagaagacaacgaacaaaagcaattattcgtagagcaacataaacattatcttgatgaaattattgaacagattagtgaattttcaaaacgcgttatactcgcagatgccaacttagataaggtactctctgcttataataaacatagggacaaacctatacgagaacaagcggaaaacattattcatttgttcacactcactaacctcggcgctccagctgcttttaaatatttcgatactacaatagatagaaaacgttatacttctacaaaggaagtcttagatgctacactcattcatcaaagtattacaggattatatgaaactcgtatagatctctcacaactcggcggggattctggcggcagcagcggcggctcaagcggaagtgaaacacctggaacttccgaaagcgctacgcctgaatcttctggtggatcttctggcggatcttccgcatgcgctagcgccaccatgtacccctatgatgtacctgattatgcttctggcggcagcagcggcggctcaagcggaagtgaaacacctggaacttccgaaagcgctacgcctgaatcttctggtggatcttctggcggatcttccgcatgcgttacccagaagtggacccatcgataccagttgaaacccggccgatgggtttttgcccccacagatgaggccaagaagtgcggtgctcacattaagcgcagcgtggcttccaggtggaaggccccaaacttctactatcacctcagaaatggcgggcacgttgcggccgtacggtcccacgaactgagccggtttttcttccgggcagatttggacgatttctttgggagagtgaaccggtctcgcgtgacccggtgccttaaaccttggttctcatacgccgaagcaagggagatggcctcagaatctgtcgtgaagcgacctggagagacagcctttgtgctgccgtatgggttcgtgcagagccctatcctcgcatccttggccctggacaagagtaaactgggtagcctgctgagatcactggacgggggccgcgatttcacggtgagcgtctatgtcgacgacatcattatctctggagacgacgaagctcaacttaaagaggtagcatcccgccttgagagagtggcgagtgaggccctgtttccactcagcagtggcaaaactcagggacccgcctctggagtgactgtttttaacatagaactgtcccatagaatgctcaggattaccgatgataggctcgcttcactgaggctcgactatcaggcgactgcatctgagcattgtaaagctggcatcgtctcctacgtatacagtgtgaatccagatcaggtcgctcaagtgaca

SEQ ID NO: 73 - DNA, 4956 bp, synthetic construct
  source 1..4956: mol_type = other DNA; note = MG160-5_cloned_into_tethered_plasmid
atgaagaggaccgctgatggttccgaatttgaatctcctaagaagaaacgaaaggttgataagaaatatagtattgggttggatattggtacgaatagtgtaggatgggcggttattactgacgaatataaagtcccctctaagaagtttaaagtcctcggtaatacagataggcatagtattaagaagaatcttattggcgctctcttatttgattccggtgagactgctgaagctacaaggttaaagaggactgctcgccggcgctatacacgaaggaagaatcgcatatgttaccttcaggaaatatttagtaatgaaatggcaaaagtcgatgattcattcttccatcgacttgaggaatcatttctcgttgaggaagacaagaagcatgaaaggcatccaatctttggaaatatagtcgatgaagtagcttatcatgagaaatatccgactatttatcatttgcgaaagaagcttgtcgattctacagataaagcggatcttaggcttatatacctcgcactcgctcatatgattaaatttaggggtcattttctgattgaaggggatctcaatcctgataattccgatgtagataagctctttattcaacttgtacaaacatataatcaattatttgaagagaatcctattaatgcttctggagtcgatgcaaaagcgattttgagcgctcgcctttccaaaagtcgcagacttgagaacttgattgctcaactcccaggtgaaaagaagaacggactctttggtaatttgatcgcattgagtcttgggttgactccaaattttaaaagtaattttgatttggctgaagacgcaaagctccaattgtccaaagatacttatgatgatgatttggataatttattagcccaaattggagatcaatatgctgatctcttcctcgcagctaagaatctctcagatgcaattttgttgtctgatatacttcgcgtaaatactgaaattacaaaagctcctctctccgcaagcatgataaaacggtatgatgaacatcatcaagatcttactcttcttaaggccttagtacgccaacaacttccggagaaatataaggaaatcttctttgatcaatcaaagaatgggtatgcagggtatatagatggcggcgcgtcacaagaggaattttataaatttataaaaccgattcttgagaaaatggatggaacagaagagcttttggtcaaattaaatagggaagatttgttgaggaaacaaagaacctttgataatgggtctattccacatcaaatacatcttggcgaattgcacgcgatactcaggcgacaagaggacttctatccttttcttaaagataatcgcgagaaaattgaaaagattctcacgtttcggattccttattatgttggaccgttagcgcggggtaattcacggtttgcttggatgactaggaaatcagaagagactattacgccttggaattttgaagaggttgtcgataaaggagcctcagctcaatcttttattgaacgaatgactaattttgacaagaatctccctaatgaaaaggtcttgcctaaacatagtcttctctatgaatattttacagtctacaatgaattgacaaaggttaagtatgtcacagaaggtatgaggaaacctgcatttctgagtggggaacaaaagaaagcgattgtcgatctcctctttaaaacgaatagaaaggtcacggtaaaacaattaaaggaagattattttaagaagattgaatgttttgattcagtcgagatatctggggtcgaggacagatttaatgcaagcttgggtacctatcatgacttgctcaagatcattaaagataaagattttctcgataacgaagagaatgaagatatccttgaggacatagtccttactctcaccctcttcgaagatcgggaaatgattgaagagcgccttaagacatacgcacatctctttgatgataaggttatgaaacaactcaaacgccgacggtatacaggatggggaagacttagtcgcaaactcataaatggaataagggataaacaatcaggaaagaccattcttgactttcttaaatctgatggatttgcaaatcgcaatttcatgcaactcattcatgatgattccctcacattcaaggaagatatacaaaaggcacaagtcagtgggcaaggggactcccttcatgaacatatcgcaaaccttgctggttctcctgcaatcaagaagggaatactccaaactgtaaaagtcgtcgatgaacttgttaaggtaatgggacgccataaaccggaaaatattgtaatagagatggcgcgagaaaatcaaacgactcaaaagggccagaagaatagcagagaaaggatgaaacgcatagaggaagggataaaggaattggggtcccaaattttgaaggagcatccagtagagaatactcaattgcaaaatgagaaactctatctttattatctccaaaacggcagggacatgtatgtcgatcaagagttagatataaatcgccttagtgattatgacgtagatgcaattgtcccccaatccttccttaaagatgatagtattgataataaagtcttgactaggagtgataagaatcgcgggaaaagtgataatgtaccatctgaggaagtagtaaagaaaatgaagaattattggcgacaactcctcaatgcaaaattgatcacgcaacgaaaatttgataacttgacgaaagctgaacggggcggactctccgagcttgacaaagcagggtttattaaacgccaattggtcgagactagacaaattacgaaacatgttgctcaaattcttgatagcagaatgaataccaaatatgatgaaaacgataaattgattcgagaggtcaaggtaattacactcaaatcaaaattagtctctgactttaggaaagactttcaattctataaggtaagggaaattaataattatcatcatgcgcatgatgcatatttgaatgctgtggtcggcacagcgttgattaagaaatatcccaaattagagtcagaatttgtttatggagattataaagtctatgatgttaggaaaatgattgcaaagtctgagcaagagattgggaaagcgacagcaaaatatttcttttatagtaatattatgaacttctttaaaacggaaatcactctcgctaatggggaaattcgcaaaagaccccttattgaaactaatggtgagacaggcgaaattgtttgggacaaaggacgtgacttcgctacagtccgcaaggttctttctatgccacaggtaaacattgttaagaaaactgaagtccaaactggcggtttctccaaggaaagcattctccctaaacgcaatagtgacaaattgattgcaaggaagaaggattgggatccaaagaaatatggtgggtttgattcaccgacagttgcgtacagtgtccttgttgtagctaaggtagagaaaggaaaatccaagaagcttaaatcagttaaggaattattaggcattacaattatggagaggtccagttttgagaagaacccgatagatttcttagaggctaaagggtacaaagaggttaagaaagatcttattataaaacttccaaaatatagtctctttgaactggagaatggacgaaaacgaatgcttgcaagtgctggagagttacaaaagggcaatgagctcgctttaccaagcaagtacgtaaattttctctatcttgcatcccattacgaaaagttgaaaggtagtccagaagacaacgaacaaaagcaattattcgtagagcaacataaacattatcttgatgaaattattgaacagattagtgaattttcaaaacgcgttatactcgcagatgccaacttagataaggtactctctgcttataataaacatagggacaaacctatacgagaacaagcggaaaacattattcatttgttcacactcactaacctcggcgctccagctgcttttaaatatttcgatactacaatagatagaaaacgttatacttctacaaaggaagtcttagatgctacactcattcatcaaagtattacaggattatatgaaactcgtatagatctctcacaactcggcggggattctggcggcagcagcggcggctcaagcggaagtgaaacacctggaacttccgaaagcgctacgcctgaatcttctggtggatcttctggcggatcttccgcatgcatgcagtggagcagctactacgagctgacccccgggagcaaaaaatacatctacatacccacagaacagtctcgagaactggggaaacttattattgagacaattagaaagcggtggactccgcccgcctacttttttcatctgcgcaaaggtggtcaccttgccgctatcaagcatcatatcgacaaaagttgtaagccacgcaaattctccgtatttgacattagcggatattttggccaggtcactgaaaataagcttagaagggtgcttaaaaatttcgtgtccttcaaagaggcttctcagtgggcttatgattccacggtcaggaagccttcagaggatcggagaaccctgccttatggattcctgcaaagcggcgacctcgcctctctggttctggacaggagttatctcggctgtgagtttcggaagatacaccagaatccaaatatcaaactctccgtgttcgtggatgacataattgcatcatcaagtgatcctattctgttggaagaggcatccaacagcatcatcaatgccgcgaagctttcaaacttcaagtttaaccaggacaagatccgatgcaatgttgatgaaattgagatctttaacatccactgcagtcaggatttcgggttgagcttctctcaagagaagttgaagaaaaactctaccaactccaagaagctc

SEQ ID NO: 74 - DNA, 5142 bp, synthetic construct
  source 1..5142: mol_type = other DNA; note = MG160-6_cloned_into_tethered_plasmid
atgaagaggaccgctgatggttccgaatttgaatctcctaagaagaaacgaaaggttgataagaaatatagtattgggttggatattggtacgaatagtgtaggatgggcggttattactgacgaatataaagtcccctctaagaagtttaaagtcctcggtaatacagataggcatagtattaagaagaatcttattggcgctctcttatttgattccggtgagactgctgaagctacaaggttaaagaggactgctcgccggcgctatacacgaaggaagaatcgcatatgttaccttcaggaaatatttagtaatgaaatggcaaaagtcgatgattcattcttccatcgacttgaggaatcatttctcgttgaggaagacaagaagcatgaaaggcatccaatctttggaaatatagtcgatgaagtagcttatcatgagaaatatccgactatttatcatttgcgaaagaagcttgtcgattctacagataaagcggatcttaggcttatatacctcgcactcgctcatatgattaaatttaggggtcattttctgattgaaggggatctcaatcctgataattccgatgtagataagctctttattcaacttgtacaaacatataatcaattatttgaagagaatcctattaatgcttctggagtcgatgcaaaagcgattttgagcgctcgcctttccaaaagtcgcagacttgagaacttgattgctcaactcccaggtgaaaagaagaacggactctttggtaatttgatcgcattgagtcttgggttgactccaaattttaaaagtaattttgatttggctgaagacgcaaagctccaattgtccaaagatacttatgatgatgatttggataatttattagcccaaattggagatcaatatgctgatctcttcctcgcagctaagaatctctcagatgcaattttgttgtctgatatacttcgcgtaaatactgaaattacaaaagctcctctctccgcaagcatgataaaacggtatgatgaacatcatcaagatcttactcttcttaaggccttagtacgccaacaacttccggagaaatataaggaaatcttctttgatcaatcaaagaatgggtatgcagggtatatagatggcggcgcgtcacaagaggaattttataaatttataaaaccgattcttgagaaaatggatggaacagaagagcttttggtcaaattaaatagggaagatttgttgaggaaacaaagaacctttgataatgggtctattccacatcaaatacatcttggcgaattgcacgcgatactcaggcgacaagaggacttctatccttttcttaaagataatcgcgagaaaattgaaaagattctcacgtttcggattccttattatgttggaccgttagcgcggggtaattcacggtttgcttggatgactaggaaatcagaagagactattacgccttggaattttgaagaggttgtcgataaaggagcctcagctcaatcttttattgaacgaatgactaattttgacaagaatctccctaatgaaaaggtcttgcctaaacatagtcttctctatgaatattttacagtctacaatgaattgacaaaggttaagtatgtcacagaaggtatgaggaaacctgcatttctgagtggggaacaaaagaaagcgattgtcgatctcctctttaaaacgaatagaaaggtcacggtaaaacaattaaaggaagattattttaagaagattgaatgttttgattcagtcgagatatctggggtcgaggacagatttaatgcaagcttgggtacctatcatgacttgctcaagatcattaaagataaagattttctcgataacgaagagaatgaagatatccttgaggacatagtccttactctcaccctcttcgaagatcgggaaatgattgaagagcgccttaagacatacgcacatctctttgatgataaggttatgaaacaactcaaacgccgacggtatacaggatggggaagacttagtcgcaaactcataaatggaataagggataaacaatcaggaaagaccattcttgactttcttaaatctgatggatttgcaaatcgcaatttcatgcaactcattcatgatgattccctcacattcaaggaagatatacaaaaggcacaagtcagtgggcaaggggactcccttcatgaacatatcgcaaaccttgctggttctcctgcaatcaagaagggaatactccaaactgtaaaagtcgtcgatgaacttgttaaggtaatgggacgccataaaccggaaaatattgtaatagagatggcgcgagaaaatcaaacgactcaaaagggccagaagaatagcagagaaaggatgaaacgcatagaggaagggataaaggaattggggtcccaaattttgaaggagcatccagtagagaatactcaattgcaaaatgagaaactctatctttattatctccaaaacggcagggacatgtatgtcgatcaagagttagatataaatcgccttagtgattatgacgtagatgcaattgtcccccaatccttccttaaagatgatagtattgataataaagtcttgactaggagtgataagaatcgcgggaaaagtgataatgtaccatctgaggaagtagtaaagaaaatgaagaattattggcgacaactcctcaatgcaaaattgatcacgcaacgaaaatttgataacttgacgaaagctgaacggggcggactctccgagcttgacaaagcagggtttattaaacgccaattggtcgagactagacaaattacgaaacatgttgctcaaattcttgatagcagaatgaataccaaatatgatgaaaacgataaattgattcgagaggtcaaggtaattacactcaaatcaaaattagtctctgactttaggaaagactttcaattctataaggtaagggaaattaataattatcatcatgcgcatgatgcatatttgaatgctgtggtcggcacagcgttgattaagaaatatcccaaattagagtcagaatttgtttatggagattataaagtctatgatgttaggaaaatgattgcaaagtctgagcaagagattgggaaagcgacagcaaaatatttcttttatagtaatattatgaacttctttaaaacggaaatcactctcgctaatggggaaattcgcaaaagaccccttattgaaactaatggtgagacaggcgaaattgtttgggacaaaggacgtgacttcgctacagtccgcaaggttctttctatgccacaggtaaacattgttaagaaaactgaagtccaaactggcggtttctccaaggaaagcattctccctaaacgcaatagtgacaaattgattgcaaggaagaaggattgggatccaaagaaatatggtgggtttgattcaccgacagttgcgtacagtgtccttgttgtagctaaggtagagaaaggaaaatccaagaagcttaaatcagttaaggaattattaggcattacaattatggagaggtccagttttgagaagaacccgatagatttcttagaggctaaagggtacaaagaggttaagaaagatcttattataaaacttccaaaatatagtctctttgaactggagaatggacgaaaacgaatgcttgcaagtgctggagagttacaaaagggcaatgagctcgctttaccaagcaagtacgtaaattttctctatcttgcatcccattacgaaaagttgaaaggtagtccagaagacaacgaacaaaagcaattattcgtagagcaacataaacattatcttgatgaaattattgaacagattagtgaattttcaaaacgcgttatactcgcagatgccaacttagataaggtactctctgcttataataaacatagggacaaacctatacgagaacaagcggaaaacattattcatttgttcacactcactaacctcggcgctccagctgcttttaaatatttcgatactacaatagatagaaaacgttatacttctacaaaggaagtcttagatgctacactcattcatcaaagtattacaggattatatgaaactcgtatagatctctcacaactcggcggggattctggcggcagcagcggcggctcaagcggaagtgaaacacctggaacttccgaaagcgctacgcctgaatcttctggtggatcttctggcggatcttccgcatgcatgttgattgacaagttttcaaaggaaataggtctgcccagaccaagcgtgcagaaaattgccgccagcgcaaactatctctacaaacactacactataccgaagaggtcagggggagaaagggatatctaccacccgacacctcgcctgaaactcgtgcagcgatggattacccggcatgtgattagagaccttcctgtgtccgacgcagcaatggcttacaggaaagggaaaagtattacagacaacgccagacttcatgccggcaagaggtttctgctgaagatggatttcactgacttcttcccctcaattaaggcccgggatctgcaacccatcctgactagccggggatacgatccagaggatgtgaatttcatcttgaccatctgcttcaaaagtgggtcccttaccataggcgccccttcctctcctgctgtatctaacatcgttatgtttgcccttgaccaggagtttaagggaatcgcagatcgaaggaagctcacctatagtcgctatgctgatgacctcacattcgctggcaatgtacgggggaatttgatcgaggcgaagaaagacgttgagagactcattggtacatgggcctcaccaaacctgaccttgaaccagcgcaaaaccgtcctggtctcttccgcacacagacaaaaagttactggtattacgcttactacggacggcgagatatccatcggacgagagaagaagagggaactccgggctatcgtccatcgcagcacatatcagaaactggagcccgaggtggaagcttacgtccagggctggctggcgtacgccaatagcatcgaaccaaagtttgtggattctctgcgcaagaagttcgacacctatcttgatttt

SEQ ID NO: 75 - DNA, 5016 bp, synthetic construct
  source 1..5016: mol_type = other DNA; note = MG160-8_cloned_into_tethered_plasmid
atgaagaggaccgctgatggttccgaatttgaatctcctaagaagaaacgaaaggttgataagaaatatagtattgggttggatattggtacgaatagtgtaggatgggcggttattactgacgaatataaagtcccctctaagaagtttaaagtcctcggtaatacagataggcatagtattaagaagaatcttattggcgctctcttatttgattccggtgagactgctgaagctacaaggttaaagaggactgctcgccggcgctatacacgaaggaagaatcgcatatgttaccttcaggaaatatttagtaatgaaatggcaaaagtcgatgattcattcttccatcgacttgaggaatcatttctcgttgaggaagacaagaagcatgaaaggcatccaatctttggaaatatagtcgatgaagtagcttatcatgagaaatatccgactatttatcatttgcgaaagaagcttgtcgattctacagataaagcggatcttaggcttatatacctcgcactcgctcatatgattaaatttaggggtcattttctgattgaaggggatctcaatcctgataattccgatgtagataagctctttattcaacttgtacaaacatataatcaattatttgaagagaatcctattaatgcttctggagtcgatgcaaaagcgattttgagcgctcgcctttccaaaagtcgcagacttgagaacttgattgctcaactcccaggtgaaaagaagaacggactctttggtaatttgatcgcattgagtcttgggttgactccaaattttaaaagtaattttgatttggctgaagacgcaaagctccaattgtccaaagatacttatgatgatgatttggataatttattagcccaaattggagatcaatatgctgatctcttcctcgcagctaagaatctctcagatgcaattttgttgtctgatatacttcgcgtaaatactgaaattacaaaagctcctctctccgcaagcatgataaaacggtatgatgaacatcatcaagatcttactcttcttaaggccttagtacgccaacaacttccggagaaatataaggaaatcttctttgatcaatcaaagaatgggtatgcagggtatatagatggcggcgcgtcacaagaggaattttataaatttataaaaccgattcttgagaaaatggatggaacagaagagcttttggtcaaattaaatagggaagatttgttgaggaaacaaagaacctttgataatgggtctattccacatcaaatacatcttggcgaattgcacgcgatactcaggcgacaagaggacttctatccttttcttaaagataatcgcgagaaaattgaaaagattctcacgtttcggattccttattatgttggaccgttagcgcggggtaattcacggtttgcttggatgactaggaaatcagaagagactattacgccttggaattttgaagaggttgtcgataaaggagcctcagctcaatcttttattgaacgaatgactaattttgacaagaatctccctaatgaaaaggtcttgcctaaacatagtcttctctatgaatattttacagtctacaatgaattgacaaaggttaagtatgtcacagaaggtatgaggaaacctgcatttctgagtggggaacaaaagaaagcgattgtcgatctcctctttaaaacgaatagaaaggtcacggtaaaacaattaaaggaagattattttaagaagattgaatgttttgattcagtcgagatatctggggtcgaggacagatttaatgcaagcttgggtacctatcatgacttgctcaagatcattaaagataaagattttctcgataacgaagagaatgaagatatccttgaggacatagtccttactctcaccctcttcgaagatcgggaaatgattgaagagcgccttaagacatacgcacatctctttgatgataaggttatgaaacaactcaaacgccgacggtatacaggatggggaagacttagtcgcaaactcataaatggaataagggataaacaatcaggaaagaccattcttgactttcttaaatctgatggatttgcaaatcgcaatttcatgcaactcattcatgatgattccctcacattcaaggaagatatacaaaaggcacaagtcagtgggcaaggggactcccttcatgaacatatcgcaaaccttgctggttctcctgcaatcaagaagggaatactccaaactgtaaaagtcgtcgatgaacttgttaaggtaatgggacgccataaaccggaaaatattgtaatagagatggcgcgagaaaatcaaacgactcaaaagggccagaagaatagcagagaaaggatgaaacgcatagaggaagggataaaggaattggggtcccaaattttgaaggagcatccagtagagaatactcaattgcaaaatgagaaactctatctttattatctccaaaacggcagggacatgtatgtcgatcaagagttagatataaatcgccttagtgattatgacgtagatgcaattgtcccccaatccttccttaaagatgatagtattgataataaagtcttgactaggagtgataagaatcgcgggaaaagtgataatgtaccatctgaggaagtagtaaagaaaatgaagaattattggcgacaactcctcaatgcaaaattgatcacgcaacgaaaatttgataacttgacgaaagctgaacggggcggactctccgagcttgacaaagcagggtttattaaacgccaattggtcgagactagacaaattacgaaacatgttgctcaaattcttgatagcagaatgaataccaaatatgatgaaaacgataaattgattcgagaggtcaaggtaattacactcaaatcaaaattagtctctgactttaggaaagactttcaattctataaggtaagggaaattaataattatcatcatgcgcatgatgcatatttgaatgctgtggtcggcacagcgttgattaagaaatatcccaaattagagtcagaatttgtttatggagattataaagtctatgatgttaggaaaatgattgcaaagtctgagcaagagattgggaaagcgacagcaaaatatttcttttatagtaatattatgaacttctttaaaacggaaatcactctcgctaatggggaaattcgcaaaagaccccttattgaaactaatggtgagacaggcgaaattgtttgggacaaaggacgtgacttcgctacagtccgcaaggttctttctatgccacaggtaaacattgttaagaaaactgaagtccaaactggcggtttctccaaggaaagcattctccctaaacgcaatagtgacaaattgattgcaaggaagaaggattgggatccaaagaaatatggtgggtttgattcaccgacagttgcgtacagtgtccttgttgtagctaaggtagagaaaggaaaatccaagaagcttaaatcagttaaggaattattaggcattacaattatggagaggtccagttttgagaagaacccgatagatttcttagaggctaaagggtacaaagaggttaagaaagatcttattataaaacttccaaaatatagtctctttgaactggagaatggacgaaaacgaatgcttgcaagtgctggagagttacaaaagggcaatgagctcgctttaccaagcaagtacgtaaattttctctatcttgcatcccattacgaaaagttgaaaggtagtccagaagacaacgaacaaaagcaattattcgtagagcaacataaacattatcttgatgaaattattgaacagattagtgaattttcaaaacgcgttatactcgcagatgccaacttagataaggtactctctgcttataataaacatagggacaaacctatacgagaacaagcggaaaacattattcatttgttcacactcactaacctcggcgctccagctgcttttaaatatttcgatactacaatagatagaaaacgttatacttctacaaaggaagtcttagatgctacactcattcatcaaagtattacaggattatatgaaactcgtatagatctctcacaactcggcggggattctggcggcagcagcggcggctcaagcggaagtgaaacacctggaacttccgaaagcgctacgcctgaatcttctggtggatcttctggcggatcttccgcatgcatgccgatcaatttcaagtttgcctatgagtgcaaaggcaagagaatttttgtgcccaacgatgagtgcgtacgccgaggcgaagcccttattaagtactgctcccaggcagtcgatttcccaagctacttttatcactaccgagctgggggtcacgtcgccgctctgcatagacacctggaacacaggtttttcttccgcatcgacatcgaaaacttcttctactccataagtcgcaaccgggtgagcgcagtcctgcaccatataggctttagaaaagctcgaccctacgctgagtggtcttgtgttaaaaacccatttggtgcccccgcctattctctgccaataggcttcgtgcagagccctatgctcgcttcactggcaattctccggtcccctgtggccgcagccatcgaaagggcggcagccgctggagcgtttgtgagtgtgtactttgatgatttcatcggaagcgctgttgaccgggagcccctcgagaaagccttccaagacattcttcattcatgccaagaagcaaaccttatttccaatcagctcaagctggctaaaccttctgaacatatcttggcctttaattgtgacttgtctcacgggatcgccgaggttgccgaggccagggtggctaagttctttaaggcccctagatcacagtgggcagaggcggcgttccgggagtattgtaatcgggtagcaagaaataaccataagagtgaagggcgcaggttcctgagg

SEQ ID NO: 76 - RNA, 125 nt, synthetic construct
  source 1..125: mol_type = other RNA; note = VEGFA_G_to_T_change_PBS2
  modified_base 1..3: mod_base = OTHER; note = 2'O-methyl ribonucleotide
  modified_base 1..4: mod_base = OTHER; note = phosphorothioate linkage
  modified_base 123..125: mod_base = OTHER; note = 2'O-methyl ribonucleotide
  modified_base 122..125: mod_base = OTHER; note = phosphorothioate linkage
gattctgcaggccagatgagttttagagctagaaatagcaagttaaaataaggctagtccgttatcaacttgaaaaagtgggaccgagtcggtccaatgtgccatctggagcactcatctttttt

SEQ ID NO: 77 - RNA, 128 nt, synthetic construct
  source 1..128: mol_type = other RNA; note = VEGFA_G_to_T_change_PBS4
  modified_base 1..3: mod_base = OTHER; note = 2'O-methyl ribonucleotide
  modified_base 1..4: mod_base = OTHER; note = phosphorothioate linkage
  modified_base 126..128: mod_base = OTHER; note = 2'O-methyl ribonucleotide
  modified_base 125..128: mod_base = OTHER; note = phosphorothioate linkage
gatgtctgcaggccagatgagttttagagctagaaatagcaagttaaaataaggctagtccgttatcaacttgaaaaagtggcaccgagtcggtgcaatgtgccatctggagcactcatctgtttttt

SEQ ID NO: 78 - RNA, 130 nt, synthetic construct
  source 1..130: mol_type = other RNA; note = VEGFA_G_to_T_change_PBS6
  modified_base 1..3: mod_base = OTHER; note = 2'O-methyl ribonucleotide
  modified_base 1..4: mod_base = OTHER; note = phosphorothioate linkage
  modified_base 128..130: mod_base = OTHER; note = 2'O-methyl ribonucleotide
  modified_base 127..130: mod_base = OTHER; note = phosphorothioate linkage
gatgtctgcaggccagatgagttttagagctagaaatagcaagttaaaataaggctagtccgttatcaacttgaaaaagtggcaccgagtcggtgcaatgtgccatctggagcactcatctggctttttt

SEQ ID NO: 79 - RNA, 132 nt, synthetic construct
  source 1..132: mol_type = other RNA; note = VEGFA_G_to_T_change_PBS8
  modified_base 1..3: mod_base = OTHER; note = 2'O-methyl ribonucleotide
  modified_base 1..4: mod_base = OTHER; note = phosphorothioate linkage
  modified_base 130..132: mod_base = OTHER; note = 2'O-methyl ribonucleotide
  modified_base 129..132: mod_base = OTHER; note = phosphorothioate linkage
gatgtctgcaggccagatgagttttagagctagaaatagcaagttaaaataaggctagtccgttatcaacttgaaaaagtggcaccgagtcggtgcaatgtgccatctggagcactcatctggccttttttt

SEQ ID NO: 80 - RNA, 134 nt, synthetic construct
  source 1..134: mol_type = other RNA; note = VEGFA_G_to_T_change_PBS10
  modified_base 1..3: mod_base = OTHER; note = 2'O-methyl ribonucleotide
  modified_base 1..4: mod_base = OTHER; note = phosphorothioate linkage
  modified_base 132..134: mod_base = OTHER; note = 2'O-methyl ribonucleotide
  modified_base 131..134: mod_base = OTHER; note = phosphorothioate linkage
gatgtctgcaggccagatgagttttagagctagaaatagcaagttaaaataaggctagtccgttatcaacttgaaaaagtggcaccgagtcggtgcaatgtgccatctggagcactcatctggcctgctttttt

SEQ ID NO: 81 - RNA, 137 nt, synthetic construct
  source 1..137: mol_type = other RNA; note = VEGFA_G_to_T_change_PBS13
  modified_base 1..3: mod_base = OTHER; note = 2'O-methyl ribonucleotide
  modified_base 1..4: mod_base = OTHER; note = phosphorothioate linkage
  modified_base 135..137: mod_base = OTHER; note = 2'O-methyl ribonucleotide
  modified_base 134..137: mod_base = OTHER; note = phosphorothioate linkage
gatgtctgcaggccagatgagttttagagctagaaatagcaagttaaaataaggctagtccgttatcaacttgaaaaagtggcaccgagtcggtgcaatgtgccatctggagcactcatctggcctgcagatttttt

SEQ ID NO: 82 - RNA, 140 nt, synthetic construct
  source 1..140: mol_type = other RNA; note = VEGFA_G_to_T_change_PBS16
  modified_base 1..3: mod_base = OTHER; note = 2'O-methyl ribonucleotide
  modified_base 1..4: mod_base = OTHER; note = phosphorothioate linkage
  modified_base 138..140: mod_base = OTHER; note = 2'O-methyl ribonucleotide
  modified_base 137..140: mod_base = OTHER; note = phosphorothioate linkage
gatgtctgcaggccagatgagttttagagctagaaatagcaagttaaaataaggctagtccgttatcaacttgaaaaagtgggaccgagtcggtccaatgtgccatctggagcactcatctggcctgcagacattttttt

SEQ ID NO: 83 - RNA, 144 nt, synthetic construct
  source 1..144: mol_type = other RNA; note = VEGFA_G_to_T_change_PBS20
  modified_base 1..3: mod_base = OTHER; note = 2'O-methyl ribonucleotide
  modified_base 1..4: mod_base = OTHER; note = phosphorothioate linkage
  modified_base 142..144: mod_base = OTHER; note = 2'O-methyl ribonucleotide
  modified_base 141..144: mod_base = OTHER; note = phosphorothioate linkage
gatgtctgcaggccagatgagttttagagctagaaatagcaagttaaaataaggctagtccgttatcaacttgaaaaagtggcaccgagtcggtgcaatgtgccatctggagcactcatctggcctgcagacatcaaatttttt

SEQ ID NO: 84 - RNA, 127 nt, synthetic construct
  source 1..127: mol_type = other RNA; note = VEGFA_deletion_change_PBS2
  modified_base 1..3: mod_base = OTHER; note = 2'O-methyl ribonucleotide
  modified_base 1..4: mod_base = OTHER; note = phosphorothioate linkage
  modified_base 125..127: mod_base = OTHER; note = 2'O-methyl ribonucleotide
  modified_base 124..127: mod_base = OTHER; note = phosphorothioate linkage
gatgtctgcaggccagatgagttttagagctagaaatagcaagttaaaataaggctagtccgttatcaacttgaaaaagtggcaccgagtcggtgcgtgtgtccctctgacaatgtgctcttttttt

SEQ ID NO: 85 - RNA, 129 nt, synthetic construct
  source 1..129: mol_type = other RNA; note = VEGFA_deletion_change_PBS4
  modified_base 1..3: mod_base = OTHER; note = 2'O-methyl ribonucleotide
  modified_base 1..4: mod_base = OTHER; note = phosphorothioate linkage
  modified_base 127..129: mod_base = OTHER; note = 2'O-methyl ribonucleotide
  modified_base 126..129: mod_base = OTHER; note = phosphorothioate linkage
gatgtctgcaggccagatgagttttagagctagaaatagcaagttaaaataaggctagtccgttatcaacttgaaaaagtggcaccgagtcggtgcgtgtgtccctctgacaatgtgctctgttttttt

SEQ ID NO: 86 - RNA, 131 nt, synthetic construct
  source 1..131: mol_type = other RNA; note = VEGFA_deletion_change_PBS6
  modified_base 1..3: mod_base = OTHER; note = 2'O-methyl ribonucleotide
  modified_base 1..4: mod_base = OTHER; note = phosphorothioate linkage
  modified_base 129..131: mod_base = OTHER; note = 2'O-methyl ribonucleotide
  modified_base 128..131: mod_base = OTHER; note = phosphorothioate linkage
gatgtctgcaggccagatgagttttagagctagaaatagcaagttaaaataaggctagtccgttatcaacttgaaaaagtggcaccgagtcggtgcgtgtgtccctctgacaatgtgctctggcttttttt

SEQ ID NO: 87 - RNA, 133 nt, synthetic construct
  source 1..133: mol_type = other RNA; note = VEGFA_deletion_change_PBS8
  modified_base 1..3: mod_base = OTHER; note = 2'O-methyl ribonucleotide
  modified_base 1..4: mod_base = OTHER; note = phosphorothioate linkage
  modified_base 131..133: mod_base = OTHER; note = 2'O-methyl ribonucleotide
  modified_base 130..133: mod_base = OTHER; note = phosphorothioate linkage
gatgtctgcaggccagatgagttttagagctagaaatagcaagttaaaataaggctagtccgttatcaacttgaaaaagtggcaccgagtcggtgcgtgtgtccctctgacaatgtgctctggcctttttttt

SEQ ID NO: 88 - RNA, 135 nt, synthetic construct
  source 1..135: mol_type = other RNA; note = VEGFA_deletion_change_PBS10
  modified_base 1..3: mod_base = OTHER; note = 2'O-methyl ribonucleotide
  modified_base 1..4: mod_base = OTHER; note = phosphorothioate linkage
  modified_base 133..135: mod_base = OTHER; note = 2'O-methyl ribonucleotide
  modified_base 132..135: mod_base = OTHER; note = phosphorothioate linkage
gatgtctgcaggccagatgagttttagagctagaaatagcaagttaaaataaggctagtccgttatcaacttgaaaaagtggcaccgagtcggtgcgtgtgtccctctgacaatgtgctctggcctgcttttttt

SEQ ID NO: 89 - RNA, 138 nt, synthetic construct
  source 1..138: mol_type = other RNA; note = VEGFA_deletion_change_PBS13
  modified_base 1..3: mod_base = OTHER; note = 2'O-methyl ribonucleotide
  modified_base 1..4: mod_base = OTHER; note = phosphorothioate linkage
  modified_base 136..138: mod_base = OTHER; note = 2'O-methyl ribonucleotide
  modified_base 135..138: mod_base = OTHER; note = phosphorothioate linkage
gatgtctgcaggccagatgagttttagagctagaaatagcaagttaaaataaggctagtccgttatcaacttgaaaaagtggcaccgagtcggtgcgtgtgtccctctgacaatgtgctctggcctgcagattttttt

SEQ ID NO: 90 - RNA, 141 nt, synthetic construct
  source 1..141: mol_type = other RNA; note = VEGFA_deletion_change_PBS16
  modified_base 1..3: mod_base = OTHER; note = 2'O-methyl ribonucleotide
  modified_base 1..4: mod_base = OTHER; note = phosphorothioate linkage
  modified_base 139..141: mod_base = OTHER; note = 2'O-methyl ribonucleotide
  modified_base 138..141: mod_base = OTHER; note = phosphorothioate linkage
gatgtctgcaggccagatgagttttagagctagaaatagcaagttaaaataaggctagtccgttatcaacttgaaaaagtggcaccgagtcggtgcgtgtgtccctctgacaatgtgctctggcctgcagacatttttttt

SEQ ID NO: 91 - RNA, 145 nt, synthetic construct
  source 1..145: mol_type = other RNA; note = VEGFA_deletion_change_PBS20
  modified_base 1..3: mod_base = OTHER; note = 2'O-methyl ribonucleotide
  modified_base 1..4: mod_base = OTHER; note = phosphorothioate linkage
  modified_base 143..145: mod_base = OTHER; note = 2'O-methyl ribonucleotide
  modified_base 142..145: mod_base = OTHER; note = phosphorothioate linkage
gatgtctgcaggccagatgagttttagagctagaaatagcaagttaaaataaggctagtccgttatcaacttgaaaaagtggcaccgagtcggtgcgtgtgtccctctgacaatgtgctctggcctgcagacatcaaattttttt

SEQ ID NO: 92 - RNA, 151 nt, synthetic construct
  source 1..151: mol_type = other RNA; note = VEGFA_insertion_change_PBS2
  modified_base 1..3: mod_base = OTHER; note = 2'O-methyl ribonucleotide
  modified_base 1..4: mod_base = OTHER; note = phosphorothioate linkage
  modified_base 149..151: mod_base = OTHER; note = 2'O-methyl ribonucleotide
  modified_base 148..151: mod_base = OTHER; note = phosphorothioate linkage
gatgtctgcaggccagatgagttttagagctagaaatagcaagttaaaataaggctagtccgttatcaacttgaaaaagtggcaccgagtcggtgcaatgtgccatctggagcactcacttatcgtcgtcatccttgtaatctcttttttt

SEQ ID NO: 93 - RNA, 153 nt, synthetic construct
  source 1..153: mol_type = other RNA; note = VEGFA_insertion_change_PBS4
  modified_base 1..3: mod_base = OTHER; note = 2'O-methyl ribonucleotide
  modified_base 1..4: mod_base = OTHER; note = phosphorothioate linkage
  modified_base 151..153: mod_base = OTHER; note = 2'O-methyl ribonucleotide
  modified_base 150..153: mod_base = OTHER; note = phosphorothioate linkage
gatgtctgcaggccagatgagttttagagctagaaatagcaagttaaaataaggctagtccgttatcaacttgaaaaagtggcaccgagtcggtgcaatgtgccatctggagcactcacttatcgtcgtcatccttgtaatctctgttttttt

SEQ ID NO: 94 - RNA, 155 nt, synthetic construct
  source 1..155: mol_type = other RNA; note = VEGFA_insertion_change_PBS6
  modified_base 1..3: mod_base = OTHER; note = 2'O-methyl ribonucleotide
  modified_base 1..4: mod_base = OTHER; note = phosphorothioate linkage
  modified_base 153..155: mod_base = OTHER; note = 2'O-methyl ribonucleotide
  modified_base 152..155: mod_base = OTHER; note = phosphorothioate linkage
gatgtctgcaggccagatgagttttagagctagaaatagcaagttaaaataaggctagtccgttatcaacttgaaaaagtggcaccgagtcggtgcaatgtgccatctggagcactcacttatcgtcgtcatccttgtaatctctggcttttttt

SEQ ID NO: 95 - RNA, 157 nt, synthetic construct
  source 1..157: mol_type = other RNA; note = VEGFA_insertion_change_PBS8
  modified_base 1..3: mod_base = OTHER; note = 2'O-methyl ribonucleotide
  modified_base 1..4: mod_base = OTHER; note = phosphorothioate linkage
  modified_base 155..157: mod_base = OTHER; note = 2'O-methyl ribonucleotide
  modified_base 154..157: mod_base = OTHER; note = phosphorothioate linkage
gatgtctgcaggccagatgagttttagagctagaaatagcaagttaaaataaggctagtccgttatcaacttgaaaaagtggcaccgagtcggtgcaatgtgccatctggagcactcacttatcgtcgtcatccttgtaatctctggcctttttttt

SEQ ID NO: 96 - RNA, 159 nt, synthetic construct
  source 1..159: mol_type = other RNA; note = VEGFA_insertion_change_PBS10
  modified_base 1..3: mod_base = OTHER; note = 2'O-methyl ribonucleotide
  modified_base 1..4: mod_base = OTHER; note = phosphorothioate linkage
  modified_base 157..159: mod_base = OTHER; note = 2'O-methyl ribonucleotide
  modified_base 156..159: mod_base = OTHER; note = phosphorothioate linkage
gatgtctgcaggccagatgagttttagagctagaaatagcaagttaaaataaggctagtccgttatcaacttgaaaaagtggcaccgagtcggtgcaatgtgccatctggagcactcacttatcgtcgtcatccttgtaatctctggcctgcttttttt

SEQ ID NO: 97 - RNA, 162 nt, synthetic construct
  source 1..162: mol_type = other RNA; note = VEGFA_insertion_change_PBS13
  modified_base 1..3: mod_base = OTHER; note = 2'O-methyl ribonucleotide
  modified_base 1..4: mod_base = OTHER; note = phosphorothioate linkage
  modified_base 160..162: mod_base = OTHER; note = 2'O-methyl ribonucleotide
  modified_base 159..162: mod_base = OTHER; note = phosphorothioate linkage
gatgtctgcaggccagatgagttttagagctagaaatagcaagttaaaataaggctagtccgttatcaacttgaaaaagtggcaccgagtcggtgcaatgtgccatctggagcactcacttatcgtcgtcatccttgtaatctctggcctgcagattttttt

SEQ ID NO: 98 - RNA, 165 nt, synthetic construct
  source 1..165: mol_type = other RNA; note = VEGFA_insertion_change_PBS16
  modified_base 1..3: mod_base = OTHER; note = 2'O-methyl ribonucleotide
  modified_base 1..4: mod_base = OTHER; note = phosphorothioate linkage
  modified_base 163..165: mod_base = OTHER; note = 2'O-methyl ribonucleotide
  modified_base 162..165: mod_base = OTHER; note = phosphorothioate linkage
gatgtctgcaggccagatgagttttagagctagaaatagcaagttaaaataaggctagtccgttatcaacttgaaaaagtggcaccgagtcggtgcaatgtgccatctggagcactcacttatcgtcgtcatccttgtaatctctggcctgcagacatttttttt

SEQ ID NO: 99 - RNA, 169 nt, synthetic construct
  source 1..169: mol_type = other RNA; note = VEGFA_insertion_change_PBS20
  modified_base 1..3: mod_base = OTHER; note = 2'O-methyl ribonucleotide
  modified_base 1..4: mod_base = OTHER; note = phosphorothioate linkage
  modified_base 167..169: mod_base = OTHER; note = 2'O-methyl ribonucleotide
  modified_base 166..169: mod_base = OTHER; note = phosphorothioate linkage
gatgtctgcaggccagatgagttttagagctagaaatagcaagttaaaataaggctagtccgttatcaacttgaaaaagtggcaccgagtcggtgcaatgtgccatctggagcactcacttatcgtcgtcatccttgtaatctctggcctgcagacatcaaattttttt

SEQ ID NO: 100 - DNA, 40 bp, synthetic construct
  source 1..40: mol_type = other DNA; note = VEGFA_forward_primer
gctcttccgatctnnnnnaaattcttctcccctgggaagc

SEQ ID NO: 101 - DNA, 40 bp, synthetic construct
  source 1..40: mol_type = other DNA; note = VEGFA_reverse_primer
gctcttccgatctnnnnntggaccccctatttctgacctc

SEQ ID NO: 102 - DNA, 230 bp, synthetic construct
  source 1..230: mol_type = other DNA; note = VEGFA_target_amplified
aaattcttctcccctgggaagcatccctggacacttcccaaaggaccccagtcactccagcctgttggctgccgctcactttgatgtctgcaggccagatgagggctccagatggcacattgtcagagggacacactgtggcccctgtgcccagccctgggctctctgtacatgaagcaactccagtcccaaatatgtagctgtttgggaggtcagaaatagggggtcca

SEQ ID NO: 103 - DNA, 105 bp, synthetic construct
  source 1..105: mol_type = other DNA; note = linker 1 for tethered RT
tctggcggcagcagcggcggctcaagcggaagtgaaacacctggaacttccgaaagcgctacgcctgaatcttctggtggatcttctggcggatcttccgcatgc

SEQ ID NO: 104 - RNA, 3652 nt, synthetic construct
  source 1..3652: mol_type = other RNA; note = MG3-6-mRNA-wild-type
aaaagccagctccagcaggcgctgctcactcctccccatcctctccctctgtccctctgtccctctgaccctgcactgtcccagcaccatggcccccaagaagaagcggaaagttaccggtggcggaggcagcagcaccgacatgaagaactaccgcatcggagtggacgtgggcgacagaagcgtgggactggccgccatcgaattcgacgacgacgggctgcccatccagaaactggcactggtgaccttccggcacgacggcggcctggaccccacgaagaacaagacaccgatgagcaggaaagagacgaggggaatcgcacgcagaacaatgaggatgaaccgagaaaggaagaggcgcctgagaaacctggacaacgtgctggaaaacctgggctacagcgtgcccgagggccccgagcccgaaacctacgaagcatggaccagccgggcactgctggccagcatcaagctggccagcgcagacgaactgaacgaacacctggtgcgagcggtgaggcacatggcacgccaccgaggatgggccaacccctggtggagcctggaccagctggaaaaggcaagccaggagcccagcgaaacattcgagatcatcctggcccgggccagggagctgttcggggagaaagtgcccgcaaaccccaccctgggcatgctgggagcactggccgcgaacaacgaagtgctgctgcgcccgagggacgagaagaagaggaagaccggatacgtgagagggacacccctgatgttcgcacaagtgcgacaaggcgaccaactggcagaactgaggcgaatctgcgaggtgcaagggatcgaagaccaatacgaggcactgcggctgggcgtgttcgaccacaaacacccctacgtgccaaaagagagagtgggaaaagacccgctgaaccccagcacaaaccgcacaatcagggcgagcctggagttccaagaattcagaatcctggacagcgtggccaacctgagagtgagaatcggcagcagggcgaaaagagagctgaccgaggccgaatacgacgcagccgtggaattcctgatggactacgcggacaaggagcagcccagctgggccgacgtggccgaaaagatcggcgtgcccggaaaccgactggtggcccccgtgctggaagacgtgcaacagaaaaccgcaccctacgacagaagcagcgcagcattcgagaaagcgatggggaagaagaccgaggcaagacaatggtgggagagcaccgacgacgaccaactgagaagcctgctgatcgcattcctggtggacgccacgaacgacacagaagaggccgccgccgaggcgggactgagcgaactgtacaagagctggcccgcagaagagagagaggccctgagcaacatcgacttcgagaaaggaagggtggcatacagccaagagaccctgagcaaactgagcgaatacatgcacgaatacagagtgggactgcacgaggcccgcaaagcagtgttcggggtggacgacacctggagaccaccactggacaaactggaggagccaacaggccaacccgcagtggacagagtgctgacaatcctgcgacggttcgtgctggactgcgagaggcaatggggccgccccagggccatcaccgtggaacacaccagaaccggcctgatggggccgacccagcgccagaaaatcctgaacgaacaaaagaagaaccgggccgacaacgagcgaatcagagacgagctgagggaaagcggggtggacaaccccagcagggccgaagtgcgaagacacctgatcgtgcaagaacaagagtgccaatgcctgtactgcggaaccatgatcaccacaaccacgagcgagctggaccacatcgtgccccgcgccggaggaggcagcagccgaagagaaaacctggccgcagtgtgcagggcctgcaacgcgaagaagaagcgcgagctgttctacgcctgggcaggcccggtgaaaagccaagaaacaatcgagcgcgtgcgccaactgaaagcattcaaagacagcaagaaggcgaaaatgttcaagaaccagatccggcgactgaaccaaaccgaggcagacgagccaatcgacgagagaagcctggccagcaccagctacgcagccgtggcagtgagggaacgcctggagcaacacttcaacgaagggctggccctggacgacaaaagccgggtggtgctggacgtctacgcgggagccgtgaccagggagagccgcagagcaggcgggatcgacgaaagaatcctgctgcggggcgagcgcgacaagaacagattcgacgtgcggcaccacgccgtggacgcggccgtgatgaccctgctgaaccgcagcgtggccctgaccctggagcaacgcagccaactgcgacgcacattctacgaacaaggcctggacaaactggaccggaaccaactgaaacccgaggaagactggcgagacttcacagggctggcccccgccagccaagagaagttcctggaatggcgaaaggcggcaaccatcctgggcgacctgctggccgaggcgatcgaggacgacagcatcgcagtggtgagccccctgagactgaggccacaaaacggcagcgtgcacctggagacaatcagcgccgtgaagaaacagacactgggaagcgactggcccgccgacgccgtgaaaaggatcgtggacccagagatctacctggccatgaaagacgcactgggcaagctgaaagaactgccagaggacagcgcacggagcctggagctgccggacggcaggttcgtggaggccgacgacgaagtgctgttcttccccgaaaacgccgccagcatcctgacccccagaggggtggccgaaatcggcggcagcatccaccacgcgcggctgtacggctggctgaccaagaaaggggagctgaaagtgggcatgctgagggtgtacggagcagagttcccctggctgatgagggaaagcggcagcagaaacgtgctgagcatgcccatccaccgcggcagccagagcttcagggacatgcaagacaccaccagaaaagccgtggaaagcggagaagccgtggaattcgcctggatcacacagaacgacgaactggaattcgacccggacgactacatcgcccacggcggaaaagacgagctgagacaattcctggggttcatgcccgagtgccgctggcgagtggacggcttcaagaagaactaccagatccgcatccgaccagccatgctgagccgcgagcagctgcccagcgacatccaacgcaggctggaaagcaaaacactgaccaagaacgagagcctgctgctgaaagcactggacaccgggctggtggtggcaatcggcggcctgctgcccctggaaacactgaaggtgatccggagaaacaacctgggcttcccacgatggcgcgggaacgggaacctgccgaccagcttcgaagtgcggagcagcgcactgagagcactgggcgtggaaggatctggcggaaaaagacctgccgccacaaagaaagccggacaggccaagaaaaagaagtgaccacacccccattcccccactccagatagaacttcagttatatctcacgtgtctggagtt

SEQ ID NO: 105 - DNA, 506 bp, synthetic construct
  source 1..506: mol_type = other DNA; note = AAVS1_target_amplified
ggacagcatgtttgctgcctccagggatcctgtgtccccgagctgggaccaccttatattcccagggccggttaatgtggctctggttctgggtacttttatctgtcccctccaccccacagtggggccactagggacaggattggtgacagaaaagcccccatccttaggcctcctccttcctagtctcctgatattcgtctaacccccacctcctgttaggcagattccttatctggtgacacacccccatttcctggagccatctctctccttgccagaacctctaaggtttgcttacgatggagccagagaggatcctgggagggagacttggcagggggtgggagggaagggggggatgcgtgacctgcccggttctcagtggccaccctgcgctaccctctcccagaacctgagctgctctgacgcggctgtctggtgcgtttcactgatcctggtgctgcagcttccttacacttcccaagaggagaagcagtttggaa

SEQ ID NO: 106 - DNA, 306 bp, synthetic construct
  source 1..306: mol_type = other DNA; note = B2M_target_amplified
gggctagtccagggctggatctcggggaagcggcggggtggcctgggagtggggaagggggtgcgcacccgggacgcgcgctacttgcccctttcggcggggagcaggggagacctttggcctacggcgacgggagggtcgggacaaagtttagggcgtcgataagcgtcagagcgccgaggttgggggagggtttctcttccgctctttcgcggggcctctggctcccccagcgcagctggagtgggggacgggtaggctcgtcccaaaggcgcggcgctgaggtttgtgaacgcgtggaggggc

SEQ ID NO: 107 - DNA, 430 bp, synthetic construct
  source 1..430: mol_type = other DNA; note = CD5_target_amplified
ggctgcctgggtcagggtcctctgggaagcccctgcagtgccccagaagggacgaagctcacaaggggcaaggcaggcagcccacggggcaggagggagctcaactgggcgtcctagggagagggcagtgaggggtgccagtggggaacccctcccagcctgacccccaccacacctttctgacccccagatttccaggcaaggctcacccgttccaactcgaagtgccagggccagctggaggtctacctcaaggacggatggcacatggtttgcagccagagctggggccggagctccaagcagtgggaggaccccagtcaagcgtcaaaagtctgccagcggctgaactgtggggtgcccttaagccttggccccttccttgtcacctacacacctcagagctcaatcatctgctacggacaactgg

SEQ ID NO: 108 - DNA, 393 bp, synthetic construct
  source 1..393: mol_type = other DNA; note = CD38_target_amplified
gggacaaaccctgctgccggctctctaggagagcccaactctgtcttggcgtcagtatcctggtcctgatcctcgtcgtggtgctcgcggtggtcgtcccgaggtggcgccagcagtggagcggtccgggcaccaccaagcgctttcccgagaccgtcctggcgcgatgcgtcaagtacactgaaattcatcctgagatgaggtgggttggcgactaaggcgcaccggtgggcactgcggggacagcagggccccgcgcgcagggaagccgcccggatcgcccggaaccgggcatcttccgtggcgggtcagccgagagcccgccgggtggtgctgagtagggagtcccgggctcggggctccgcgggccgctttcaggagcagctggccttg

SEQ ID NO: 109 - RNA, 129 nt, synthetic construct
  source 1..129: mol_type = other RNA; note = AAVS1_PBS_2
  modified_base 1..3: mod_base = OTHER; note = 2'O-methyl ribonucleotide
  modified_base 1..4: mod_base = OTHER; note = phosphorothioate linkage
  modified_base 127..129: mod_base = OTHER; note = 2'O-methyl ribonucleotide
  modified_base 126..129: mod_base = OTHER; note = phosphorothioate linkage
ggctccatcgtaagcaaaccttgttgagaatcgaaagattcttaataaggcatccttccgatgctgacttctcaccgtccgttatccaataggagcgggcggtatggccagaccttctaaggttttttt

SEQ ID NO: 110 - RNA, 131 nt, synthetic construct
  source 1..131: mol_type = other RNA; note = AAVS1_PBS_4
  modified_base 1..3: mod_base = OTHER; note = 2'O-methyl ribonucleotide
  modified_base 1..4: mod_base = OTHER; note = phosphorothioate linkage
  modified_base 129..131: mod_base = OTHER; note = 2'O-methyl ribonucleotide
  modified_base 128..131: mod_base = OTHER; note = phosphorothioate linkage
ggctccatcgtaagcaaaccttgttgagaatcgaaagattcttaataaggcatccttccgatgctgacttctcaccgtccgttatccaataggagcgggcggtatggccagaccttctaaggttttttttt

SEQ ID NO: 111 - RNA, 135 nt, synthetic construct
  source 1..135: mol_type = other RNA; note = AAVS1_PBS_8
  modified_base 1..3: mod_base = OTHER; note = 2'O-methyl ribonucleotide
  modified_base 1..4: mod_base = OTHER; note = phosphorothioate linkage
  modified_base 133..135: mod_base = OTHER; note = 2'O-methyl ribonucleotide
  modified_base 132..135: mod_base = OTHER; note = phosphorothioate linkage
ggctccatcgtaagcaaaccttgttgagaatcgaaagattcttaataaggcatccttccgatgctgacttctcaccgtccgttatccaataggagcgggcggtatggccagaccttctaaggtttgctttttttt

SEQ ID NO: 112 - RNA, 137 nt, synthetic construct
  source 1..137: mol_type = other RNA; note = AAVS1_PBS_10
  modified_base 1..3: mod_base = OTHER; note = 2'O-methyl ribonucleotide
  modified_base 1..4: mod_base = OTHER; note = phosphorothioate linkage
  modified_base 135..137: mod_base = OTHER; note = 2'O-methyl ribonucleotide
  modified_base 134..137: mod_base = OTHER; note = phosphorothioate linkage
ggctccatcgtaagcaaaccttgttgagaatcgaaagattcttaataaggcatccttccgatgctgacttctcaccgtccgttatccaataggagcgggcggtatggccagaccttctaaggtttgcttactttttt

SEQ ID NO: 113 - RNA, 140 nt, synthetic construct
  source 1..140: mol_type = other RNA; note = AAVS1_PBS_13
  modified_base 1..3: mod_base = OTHER; note = 2'O-methyl ribonucleotide
  modified_base 1..4: mod_base = OTHER; note = phosphorothioate linkage
  modified_base 138..140: mod_base = OTHER; note = 2'O-methyl ribonucleotide
  modified_base 137..140: mod_base = OTHER; note = phosphorothioate linkage
ggctccatcgtaagcaaaccttgttgagaatcgaaagattcttaataaggcatccttccgatgctgacttctcaccgtccgttatccaataggagcgggcggtatggccagaccttctaaggtttgcttacgattttttt

SEQ ID NO: 114 - RNA, 143 nt, synthetic construct
  source 1..143: mol_type = other RNA; note = AAVS1_PBS_16
  modified_base 1..3: mod_base = OTHER; note = 2'O-methyl ribonucleotide
  modified_base 1..4: mod_base = OTHER; note = phosphorothioate linkage
  modified_base 141..143: mod_base = OTHER; note = 2'O-methyl ribonucleotide
  modified_base 140..143: mod_base = OTHER; note = phosphorothioate linkage
ggctccatcgtaagcaaaccttgttgagaatcgaaagattcttaataaggcatccttccgatgctgacttctcaccgtccgttatccaataggagcgggcggtatggccagaccttctaaggtttgcttacgatggatttttt

SEQ ID NO: 115 - RNA, 147 nt, synthetic construct
  source 1..147: mol_type = other RNA; note = AAVS1_PBS_20
  modified_base 1..3: mod_base = OTHER; note = 2'O-methyl ribonucleotide
  modified_base 1..4: mod_base = OTHER; note = phosphorothioate linkage
  modified_base 145..147: mod_base = OTHER; note = 2'O-methyl ribonucleotide
  modified_base 144..147: mod_base = OTHER; note = phosphorothioate linkage
ggctccatcgtaagcaaaccttgttgagaatcgaaagattcttaataaggcatccttccgatgctgacttctcaccgtccgttatccaataggagcgggcggtatggccagaccttctaaggtttgcttacgatggagccatttttt

SEQ ID NO: 116 - RNA, 112 nt, synthetic construct
  source 1..112: mol_type = other RNA; note = AAVS1_Guide
  modified_base 1..3: mod_base = OTHER; note = 2'O-methyl ribonucleotide
  modified_base 1..4: mod_base = OTHER; note = phosphorothioate linkage
  modified_base 110..112: mod_base = OTHER; note = 2'O-methyl ribonucleotide
  modified_base 109..112: mod_base = OTHER; note = phosphorothioate linkage
ggctccatcgtaagcaaaccttgttgagaatcgaaagattcttaataaggcatccttccgatgctgacttctcaccgtccgttatccaataggagcgggcggtatgtttttt

SEQ ID NO: 117 - RNA, 129 nt, synthetic construct
  source 1..129: mol_type = other RNA; note = B2M_PBS_2
  modified_base 1..3: mod_base = OTHER; note = 2'O-methyl ribonucleotide
  modified_base 1..4: mod_base = OTHER; note = phosphorothioate linkage
  modified_base 127..129: mod_base = OTHER; note = 2'O-methyl ribonucleotide
  modified_base 126..129: mod_base = OTHER; note = phosphorothioate linkage
cgtcagagcgccgaggttgggggttgagaatcgaaagattcttaataaggcatccttccgatgctgacttctcaccgtccgttatccaataggagcgggcggtatgagagaaacactcctccatttttt

SEQ ID NO: 118 - RNA, 131 nt, synthetic construct
  source 1..131: mol_type = other RNA; note = B2M_PBS_4
  modified_base 1..3: mod_base = OTHER; note = 2'O-methyl ribonucleotide
  modified_base 1..4: mod_base = OTHER; note = phosphorothioate linkage
  modified_base 129..131: mod_base = OTHER; note = 2'O-methyl ribonucleotide
  modified_base 128..131: mod_base = OTHER; note = phosphorothioate linkage
cgtcagagcgccgaggttgggggttgagaatcgaaagattcttaataaggcatccttccgatgctgacttctcaccgtccgttatccaataggagcgggcggtatgagagaaacactcctccaactttttt

SEQ ID NO: 119 - RNA, 135 nt, synthetic construct
  source 1..135: mol_type = other RNA; note = B2M_PBS_8
  modified_base 1..3: mod_base = OTHER; note = 2'O-methyl ribonucleotide
  modified_base 1..4: mod_base = OTHER; note = phosphorothioate linkage
  modified_base 133..135: mod_base = OTHER; note = 2'O-methyl ribonucleotide
  modified_base 132..135: mod_base = OTHER; note = phosphorothioate linkage
cgtcagagcgccgaggttgggggttgagaatcgaaagattcttaataaggcatccttccgatgctgacttctcaccgtccgttatccaataggagcgggcggtatgagagaaacactcctccaacctcgtttttt

SEQ ID NO: 120 - RNA, 137 nt, synthetic construct
  source 1..137: mol_type = other RNA; note = B2M_PBS_10
  modified_base 1..3: mod_base = OTHER; note = 2'O-methyl ribonucleotide
  modified_base 1..4: mod_base = OTHER; note = phosphorothioate linkage
  modified_base 135..137: mod_base = OTHER; note = 2'O-methyl ribonucleotide
  modified_base 134..137: mod_base = OTHER; note = phosphorothioate linkage
cgtcagagcgccgaggttgggggttgagaatcgaaagattcttaataaggcatccttccgatgctgacttctcaccgtccgttatccaataggagcgggcggtatgagagaaacactcctccaacctcggctttttt

SEQ ID NO: 121 - RNA, 140 nt, synthetic construct
  source 1..140: mol_type = other RNA; note = B2M_PBS_13
  modified_base 1..3: mod_base = OTHER; note = 2'O-methyl ribonucleotide
  modified_base 1..4: mod_base = OTHER; note = phosphorothioate linkage
  modified_base 138..140: mod_base = OTHER; note = 2'O-methyl ribonucleotide
  modified_base 137..140: mod_base = OTHER; note = phosphorothioate linkage
cgtcagagcgccgaggttgggggttgagaatcgaaagattcttaataaggcatccttccgatgctgacttctcaccgtccgttatccaataggagcgggcggtatgagagaaacactcctccaacctcggcgcttttttt

SEQ ID NO: 122 - RNA, 143 nt, synthetic construct
  source 1..143: mol_type = other RNA; note = B2M_PBS_16
  modified_base 1..3: mod_base = OTHER; note = 2'O-methyl ribonucleotide
  modified_base 1..4: mod_base = OTHER; note = phosphorothioate linkage
  modified_base 141..143: mod_base = OTHER; note = 2'O-methyl ribonucleotide
  modified_base 140..143: mod_base = OTHER; note = phosphorothioate linkage
cgtcagagcgccgaggttgggggttgagaatcgaaagattcttaataaggcatccttccgatgctgacttctcaccgtccgttatccaataggagcgggcggtatgagagaaacactcctccaacctcggcgctctgtttttt

SEQ ID NO: 123 - RNA, 147 nt, synthetic construct
  source 1..147: mol_type = other RNA; note = B2M_PBS_20
  modified_base 1..3: mod_base = OTHER; note = 2'O-methyl ribonucleotide
  modified_base 1..4: mod_base = OTHER; note = phosphorothioate linkage
  modified_base 145..147: mod_base = OTHER; note = 2'O-methyl ribonucleotide
  modified_base 144..147: mod_base = OTHER; note = phosphorothioate linkage
cgtcagagcgccgaggttgggggttgagaatcgaaagattcttaataaggcatccttccgatgctgacttctcaccgtccgttatccaataggagcgggcggtatgagagaaacactcctccaacctcggcgctctgacgctttttt

SEQ ID NO: 124 - RNA, 112 nt, synthetic construct
  source 1..112: mol_type = other RNA; note = B2M_Guide
  modified_base 1..3: mod_base = OTHER; note = 2'O-methyl ribonucleotide
  modified_base 1..4: mod_base = OTHER; note = phosphorothioate linkage
  modified_base 110..112: mod_base = OTHER; note = 2'O-methyl ribonucleotide
  modified_base 109..112: mod_base = OTHER; note = phosphorothioate linkage
cgtcagagcgccgaggttgggggttgagaatcgaaagattcttaataaggcatccttccgatgctgacttctcaccgtccgttatccaataggagcgggcggtatgtttttt

SEQ ID NO: 125 - RNA, 129 nt, synthetic construct
  source 1..129: mol_type = other RNA; note = CD5_PBS_2
  modified_base 1..3: mod_base = OTHER; note = 2'O-methyl ribonucleotide
  modified_base 1..4: mod_base = OTHER; note = phosphorothioate linkage
  modified_base 127..129: mod_base = OTHER; note = 2'O-methyl ribonucleotide
  modified_base 126..129: mod_base = OTHER; note = phosphorothioate linkage
ggtgagccttgcctggaaatctgttgagaatcgaaagattcttaataaggcatccttccgatgctgacttctcaccgtccgttatccaataggagcgggcggtatgtttctgaccgaaagatttttttt

SEQ ID NO: 126 - RNA, 131 nt, synthetic construct
  source 1..131: mol_type = other RNA; note = CD5_PBS_4
  modified_base 1..3: mod_base = OTHER; note = 2'O-methyl ribonucleotide
  modified_base 1..4: mod_base = OTHER; note = phosphorothioate linkage
  modified_base 129..131: mod_base = OTHER; note = 2'O-methyl ribonucleotide
  modified_base 128..131: mod_base = OTHER; note = phosphorothioate linkage
ggtgagccttgcctggaaatctgttgagaatcgaaagattcttaataaggcatccttccgatgctgacttctcaccgtccgttatccaataggagcgggcggtatgtttctgaccgaaagatttctttttt

SEQ ID NO: 127 - RNA, 135 nt, synthetic construct
  source 1..135: mol_type = other RNA; note = CD5_PBS_8
  modified_base 1..3: mod_base = OTHER; note = 2'O-methyl ribonucleotide
  modified_base 1..4: mod_base = OTHER; note = phosphorothioate linkage
  modified_base 133..135: mod_base = OTHER; note = 2'O-methyl ribonucleotide
  modified_base 132..135: mod_base = OTHER; note = phosphorothioate linkage
ggtgagccttgcctggaaatctgttgagaatcgaaagattcttaataaggcatccttccgatgctgacttctcaccgtccgttatccaataggagcgggcggtatgtttctgaccgaaagatttccaggtttttt

SEQ ID NO: 128 - RNA, 137 nt, synthetic construct
  source 1..137: mol_type = other RNA; note = CD5_PBS_10
  modified_base 1..3: mod_base = OTHER; note = 2'O-methyl ribonucleotide
  modified_base 1..4: mod_base = OTHER; note = phosphorothioate linkage
  modified_base 135..137: mod_base = OTHER; note = 2'O-methyl ribonucleotide
  modified_base 134..137: mod_base = OTHER; note = phosphorothioate linkage
ggtgagccttgcctggaaatctgttgagaatcgaaagattcttaataaggcatccttccgatgctgacttctcaccgtccgttatccaataggagcgggcggtatgtttctgaccgaaagatttccaggcatttttt

SEQ ID NO: 129 - RNA, 140 nt, synthetic construct
  source 1..140: mol_type = other RNA; note = CD5_PBS_13
  modified_base 1..3: mod_base = OTHER; note = 2'O-methyl ribonucleotide
  modified_base 1..4: mod_base = OTHER; note = phosphorothioate linkage
  modified_base 138..140: mod_base = OTHER; note = 2'O-methyl ribonucleotide
  modified_base 137..140: mod_base = OTHER; note = phosphorothioate linkage
ggtgagccttgcctggaaatctgttgagaatcgaaagattcttaataaggcatccttccgatgctgacttctcaccgtccgttatccaataggagcgggcggtatgtttctgaccgaaagatttccaggcaaggtttttt

SEQ ID NO: 130 - RNA, 143 nt, synthetic construct
  source 1..143: mol_type = other RNA; note = CD5_PBS_16
  modified_base 1..3: mod_base = OTHER; note = 2'O-methyl ribonucleotide
  modified_base 1..4: mod_base = OTHER; note = phosphorothioate linkage
  modified_base 141..143: mod_base = OTHER; note = 2'O-methyl ribonucleotide
  modified_base 140..143: mod_base = OTHER; note = phosphorothioate linkage
ggtgagccttgcctggaaatctgttgagaatcgaaagattcttaataaggcatccttccgatgctgacttctcaccgtccgttatccaataggagcgggcggtatgtttctgaccgaaagatttccaggcaaggctctttttt

SEQ ID NO: 131 - RNA, 147 nt, synthetic construct
  source 1..147: mol_type = other RNA; note = CD5_PBS_20
  modified_base 1..3: mod_base = OTHER; note = 2'O-methyl ribonucleotide
  modified_base 1..4: mod_base = OTHER; note = phosphorothioate linkage
  modified_base 145..147: mod_base = OTHER; note = 2'O-methyl ribonucleotide
  modified_base 144..147: mod_base = OTHER; note = phosphorothioate linkage
ggtgagccttgcctggaaatctgttgagaatcgaaagattcttaataaggcatccttccgatgctgacttctcaccgtccgttatccaataggagcgggcggtatgtttctgaccgaaagatttccaggcaaggctcaccctttttt

SEQ ID NO: 132 - RNA, 112 nt, synthetic construct
  source 1..112: mol_type = other RNA; note = CD5_Guide
  modified_base 1..3: mod_base = OTHER; note = 2'O-methyl ribonucleotide
  modified_base 1..4: mod_base = OTHER; note = phosphorothioate linkage
  modified_base 110..112: mod_base = OTHER; note = 2'O-methyl ribonucleotide
  modified_base 109..112: mod_base = OTHER; note = phosphorothioate linkage
ggtgagccttgcctggaaatctgttgagaatcgaaagattcttaataaggcatccttccgatgctgacttctcaccgtccgttatccaataggagcgggcggtatgtttttt

SEQ ID NO: 133 - RNA, 129 nt, synthetic construct
  source 1..129: mol_type = other RNA; note = CD38_PBS_2
  modified_base 1..3: mod_base = OTHER; note = 2'O-methyl ribonucleotide
  modified_base 1..4: mod_base = OTHER; note = phosphorothioate linkage
  modified_base 127..129: mod_base = OTHER; note = 2'O-methyl ribonucleotide
  modified_base 126..129: mod_base = OTHER; note = phosphorothioate linkage
ctgaaattcatcctgagatgaggttgagaatcgaaagattcttaataaggcatccttccgatgctgacttctcaccgtccgttatccaataggagcgggcggtatgtcgccaacacacctcattttttt

SEQ ID NO: 134 - RNA, 131 nt, synthetic construct
  source 1..131: mol_type = other RNA; note = CD38_PBS_4
  modified_base 1..3: mod_base = OTHER; note = 2'O-methyl ribonucleotide
  modified_base 1..4: mod_base = OTHER; note = phosphorothioate linkage
  modified_base 129..131: mod_base = OTHER; note = 2'O-methyl ribonucleotide
  modified_base 128..131: mod_base = OTHER; note = phosphorothioate linkage
ctgaaattcatcctgagatgaggttgagaatcgaaagattcttaataaggcatccttccgatgctgacttctcaccgtccgttatccaataggagcgggcggtatgtcgccaacacacctcatcttttttt

SEQ ID NO: 135 - RNA, 135 nt, synthetic construct
  source 1..135: mol_type = other RNA; note = CD38_PBS_8
  modified_base 1..3: mod_base = OTHER; note = 2'O-methyl ribonucleotide
  modified_base 1..4: mod_base = OTHER; note = phosphorothioate linkage
  modified_base 133..135: mod_base = OTHER; note = 2'O-methyl ribonucleotide
  modified_base 132..135: mod_base = OTHER; note = phosphorothioate linkage
ctgaaattcatcctgagatgaggttgagaatcgaaagattcttaataaggcatccttccgatgctgacttctcaccgtccgttatccaataggagcgggcggtatgtcgccaacacacctcatctcaggtttttt

SEQ ID NO: 136 - RNA, 137 nt, synthetic construct
  source 1..137: mol_type = other RNA; note = CD38_PBS_10
  modified_base 1..3: mod_base = OTHER; note = 2'O-methyl ribonucleotide
  modified_base 1..4: mod_base = OTHER; note = phosphorothioate linkage
  modified_base 135..137: mod_base = OTHER; note = 2'O-methyl ribonucleotide
  modified_base 134..137: mod_base = OTHER; note = phosphorothioate linkage
ctgaaattcatcctgagatgaggttgagaatcgaaagattcttaataaggcatccttccgatgctgacttctcaccgtccgttatccaataggagcgggcggtatgtcgccaacacacctcatctcaggattttttt

SEQ ID NO: 137 - RNA, 140 nt, synthetic construct
  source 1..140: mol_type = other RNA; note = CD38_PBS_13
  modified_base 1..3: mod_base = OTHER; note = 2'O-methyl ribonucleotide
  modified_base 1..4: mod_base = OTHER; note = phosphorothioate linkage
  modified_base 138..140: mod_base = OTHER; note = 2'O-methyl ribonucleotide
  modified_base 137..140: mod_base = OTHER; note = phosphorothioate linkage
ctgaaattcatcctgagatgaggttgagaatcgaaagattcttaataaggcatccttccgatgctgacttctcaccgtccgttatccaataggagcgggcggtatgtcgccaacacacctcatctcaggatgaatttttt

SEQ ID NO: 138 - RNA, 143 nt, synthetic construct
  source 1..143: mol_type = other RNA; note = CD38_PBS_16
  modified_base 1..3: mod_base = OTHER; note = 2'O-methyl ribonucleotide
  modified_base 1..4: mod_base = OTHER; note = phosphorothioate linkage
  modified_base 141..143: mod_base = OTHER; note = 2'O-methyl ribonucleotide
  modified_base 140..143: mod_base = OTHER; note = phosphorothioate linkage
ctgaaattcatcctgagatgaggttgagaatcgaaagattcttaataaggcatccttccgatgctgacttctcaccgtccgttatccaataggagcgggcggtatgtcgccaacacacctcatctcaggatgaattttttttt

SEQ ID NO: 139 - RNA, 146 nt, synthetic construct
  source 1..146: mol_type = other RNA; note = CD38_PBS_20
  modified_base 1..3: mod_base = OTHER; note = 2'O-methyl ribonucleotide
  modified_base 1..4: mod_base = OTHER; note = phosphorothioate linkage
  modified_base 144..146: mod_base = OTHER; note = 2'O-methyl ribonucleotide
  modified_base 143..146: mod_base = OTHER; note = phosphorothioate linkage
ctgaaattcatcctgagatgaggttgagaatcgaaagattcttaataaggcatccttccgatgctgacttctcaccgtccgttatccaataggagcgggcggtatgtcgccaacacacctcatctcaggatgaatttcagtttttt

SEQ ID NO: 140 - RNA, 112 nt, synthetic construct
  source 1..112: mol_type = other RNA; note = CD38_Guide
  modified_base 1..3: mod_base = OTHER; note = 2'O-methyl ribonucleotide
  modified_base 1..4: mod_base = OTHER; note = phosphorothioate linkage
  modified_base 110..112: mod_base = OTHER; note = 2'O-methyl ribonucleotide
  modified_base 109..112: mod_base = OTHER; note = phosphorothioate linkage
ctgaaattcatcctgagatgaggttgagaatcgaaagattcttaataaggcatccttccgatgctgacttctcaccgtccgttatccaataggagcgggcggtatgtttttt

SEQ ID NO: 141 - DNA, 21 bp, synthetic construct
  source 1..21: mol_type = other DNA; note = AAVS1_forward_primer
ggacagcatgtttgctgcctc

SEQ ID NO: 142 - DNA, 20 bp, synthetic construct
  source 1..20: mol_type = other DNA; note = AAVS1_reverse_primer
ttccaaactgcttctcctct

SEQ ID NO: 143 - DNA, 20 bp, synthetic construct
  source 1..20: mol_type = other DNA; note = B2M_forward_primer
gggctagtccagggctggat

SEQ ID NO: 144 - DNA, 24 bp, synthetic construct
  source 1..24: mol_type = other DNA; note = B2M_reverse_primer
gccaagcattctacaaacgtcgcg

SEQ ID NO: 145 - DNA, 20 bp, synthetic construct
  source 1..20: mol_type = other DNA; note = CD5_forward_primer
ggctgcctgggtcagggtcc

SEQ ID NO: 146 - DNA, 21 bp, synthetic construct
  source 1..21: mol_type = other DNA; note = CD5_reverse_primer
ccagttgtccgtagcagatga

SEQ ID NO: 147 - DNA, 20 bp, synthetic construct
  source 1..20: mol_type = other DNA; note = CD38_forward_primer
gggacaaaccctgctgccgg

SEQ ID NO: 148 - DNA, 21 bp, synthetic construct
  source 1..21: mol_type = other DNA; note = CD38_reverse_primer
caaggccagctgctcctgaaa

SEQ ID NO: 149 - RNA, 113 nt, synthetic construct
  source 1..113: mol_type = other RNA; note = VEGFA_Guide
  modified_base 1..3: mod_base = OTHER; note = 2'O-methyl ribonucleotide
  modified_base 1..4: mod_base = OTHER; note = phosphorothioate linkage
  modified_base 111..113: mod_base = OTHER; note = 2'O-methyl ribonucleotide
  modified_base 110..113: mod_base = OTHER; note = phosphorothioate linkage
ctttgatgtctgcaggccagatgttgagaatcgaaagattcttaataaggcatccttccgatgctgacttctcaccgtccgttatccaataggagcgggcggtatgttttttt

SEQ ID NO: 150 - DNA, 824 bp, synthetic construct
  source 1..824: mol_type = other DNA; note = MCP-RT-GFP-Normalintron-MS2
gtgatgcggttttggcagtacatcaatgggcgtggatagcggtttgactcacggggatttccaagtctccaccccattgacgtcaatgggagtttgttttggcaccaaaatcaacgggactttccaaaatgtcgtaacaactccgccccattgacgcaaatgggcggtaggcgtgtacggtgggaggtctatataagcagagctggtttagtgaaccgtcagatccgctagctaaaaccacaaaggccaccatggactacaaagacgatgacgacaagtacccctatgatgtacctgattatgctcctaagaagaaaagaaaggtggccagcaatttcacacagttcgtccttgtagacaacggcggcaccggggatgttacagtggccccgagcaatttcgcaaacggcgtagccgagtggatctcctctaatagcagaagccaggcttataaggttacatgctctgtaaggcagtcttccgcacaaaatagaaagtacacaatcaaggtcgaagtgcccaaggttgctacacagaccgttggtggagaggagttgccagtggctgggtggcgctcctacctgaatatggagttaacaatccccattttcgctaccaattcagactgtgaactcattgtcaaagctatgcaaggtcttcttaaggatggtaacccaattccaagtgcaattgctgctaattcaggcatttattctggcggcagcagcggcggctcaagcggaagtgaaacacctggaacttccgaaagcgctacgcctgaatcttctggtggatcttctggcggatcttccgcatgcgtcgac

SEQ ID NO: 151 - DNA, 824 bp, synthetic construct; identical to SEQ ID NO: 150
  source 1..824: mol_type = other DNA; note = MCP-RT-GFP-Chimericintron-MS2

SEQ ID NO: 152 - protein, 1134 aa, synthetic construct
  source 1..1134: note = nMG3-6_D13A
MSTDMKNYRIGVAVGDRSVGLAAIEFDDDGLPIQKLALVTFRHDGGLDPTKNKTPMSRKETRGIARRTMRMNRERKRRLRNLDNVLENLGYSVPEGPEPETYEAWTSRALLASIKLASADELNEHLVRAVRHMARHRGWANPWWSLDQLEKASQEPSETFEIILARARELFGEKVPANPTLGMLGALAANNEVLLRPRDEKKRKTGYVRGTPLMFAQVRQGDQLAELRRICEVQGIEDQYEALRLGVFDHKHPYVPKERVGKDPLNPSTNRTIRASLEFQEFRILDSVANLRVRIGSRAKRELTEAEYDAAVEFLMDYADKEQPSWADVAEKIGVPGNRLVAPVLEDVQQKTAPYDRSSAAFEKAMGKKTEARQWWESTDDDQLRSLLIAFLVDATNDTEEAAAEAGLSELYKSWPAEEREALSNIDFEKGRVAYSQETLSKLSEYMHEYRVGLHEARKAVFGVDDTWRPPLDKLEEPTGQPAVDRVLTILRRFVLDCERQWGRPRAITVEHTRTGLMGPTQRQKILNEQKKNRADNERIRDELRESGVDNPSRAEVRRHLIVQEQECQCLYCGTMITTTTSELDHIVPRAGGGSSRRENLAAVCRACNAKKKRELFYAWAGPVKSQETIERVRQLKAFKDSKKAKMFKNQIRRLNQTEADEPIDERSLASTSYAAVAVRERLEQHFNEGLALDDKSRVVLDVYAGAVTRESRRAGGIDERILLRGERDKNRFDVRHHAVDAAVMTLLNRSVALTLEQRSQLRRTFYEQGLDKLDRNQLKPEEDWRDFTGLAPASQEKFLEWRKAATILGDLLAEAIEDDSIAVVSPLRLRPQNGSVHLETISAVKKQTLGSDWPADAVKRIVDPEIYLAMKDALGKLKELPEDSARSLELPDGRFVEADDEVLFFPENAASILTPRGVAEIGGSIHHARLYGWLTKKGELKVGMLRVYGAEFPWLMRESGSRNVLSMPIHRGSQSFRDMQDTTRKAVESGEAVEFAWITQNDELEFDPDDYIAHGGKDELRQFLGFMPECRWRVDGFKKNYQIRIRPAMLSREQLPSDIQRRLESKTLTKNESLLLKALDTGLVVAIGGLLPLETLKVIRRNNLGFPRWRGNGNLPTSFEVRSSALRALGVEG

SEQ ID NO: 153 - protein, 1134 aa, synthetic construct
  source 1..1134: note = nMG3-6_H586A
MSTDMKNYRIGVDVGDRSVGLAAIEFDDDGLPIQKLALVTFRHDGGLDPTKNKTPMSRKETRGIARRTMRMNRERKRRLRNLDNVLENLGYSVPEGPEPETYEAWTSRALLASIKLASADELNEHLVRAVRHMARHRGWANPWWSLDQLEKASQEPSETFEIILARARELFGEKVPANPTLGMLGALAANNEVLLRPRDEKKRKTGYVRGTPLMFAQVRQGDQLAELRRICEVQGIEDQYEALRLGVFDHKHPYVPKERVGKDPLNPSTNRTIRASLEFQEFRILDSVANLRVRIGSRAKRELTEAEYDAAVEFLMDYADKEQPSWADVAEKIGVPGNRLVAPVLEDVQQKTAPYDRSSAAFEKAMGKKTEARQWWESTDDDQLRSLLIAFLVDATNDTEEAAAEAGLSELYKSWPAEEREALSNIDFEKGRVAYSQETLSKLSEYMHEYRVGLHEARKAVFGVDDTWRPPLDKLEEPTGQPAVDRVLTILRRFVLDCERQWGRPRAITVEHTRTGLMGPTQRQKILNEQKKNRADNERIRDELRESGVDNPSRAEVRRHLIVQEQECQCLYCGTMITTTTSELDAIVPRAGGGSSRRENLAAVCRACNAKKKRELFYAWAGPVKSQETIERVRQLKAFKDSKKAKMFKNQIRRLNQTEADEPIDERSLASTSYAAVAVRERLEQHFNEGLALDDKSRVVLDVYAGAVTRESRRAGGIDERILLRGERDKNRFDVRHHAVDAAVMTLLNRSVALTLEQRSQLRRTFYEQGLDKLDRNQLKPEEDWRDFTGLAPASQEKFLEWRKAATILGDLLAEAIEDDSIAVVSPLRLRPQNGSVHLETISAVKKQTLGSDWPADAVKRIVDPEIYLAMKDALGKLKELPEDSARSLELPDGRFVEADDEVLFFPENAASILTPRGVAEIGGSIHHARLYGWLTKKGELKVGMLRVYGAEFPWLMRESGSRNVLSMPIHRGSQSFRDMQDTTRKAVESGEAVEFAWITQNDELEFDPDDYIAHGGKDELRQFLGFMPECRWRVDGFKKNYQIRIRPAMLSREQLPSDIQRRLESKTLTKNESLLLKALDTGLVVAIGGLLPLETLKVIRRNNLGFPRWRGNGNLPTSFEVRSSALRALGVEG

SEQ ID NO: 154 - protein, 1134 aa, synthetic construct
  source 1..1134: note = nMG3-6_N609A
MSTDMKNYRIGVDVGDRSVGLAAIEFDDDGLPIQKLALVTFRHDGGLDPTKNKTPMSRKETRGIARRTMRMNRERKRRLRNLDNVLENLGYSVPEGPEPETYEAWTSRALLASIKLASADELNEHLVRAVRHMARHRGWANPWWSLDQLEKASQEPSETFEIILARARELFGEKVPANPTLGMLGALAANNEVLLRPRDEKKRKTGYVRGTPLMFAQVRQGDQLAELRRICEVQGIEDQYEALRLGVFDHKHPYVPKERVGKDPLNPSTNRTIRASLEFQEFRILDSVANLRVRIGSRAKRELTEAEYDAAVEFLMDYADKEQPSWADVAEKIGVPGNRLVAPVLEDVQQKTAPYDRSSAAFEKAMGKKTEARQWWESTDDDQLRSLLIAFLVDATNDTEEAAAEAGLSELYKSWPAEEREALSNIDFEKGRVAYSQETLSKLSEYMHEYRVGLHEARKAVFGVDDTWRPPLDKLEEPTGQPAVDRVLTILRRFVLDCERQWGRPRAITVEHTRTGLMGPTQRQKILNEQKKNRADNERIRDELRESGVDNPSRAEVRRHLIVQEQECQCLYCGTMITTTTSELDHIVPRAGGGSSRRENLAAVCRACAAKKKRELFYAWAGPVKSQETIERVRQLKAFKDSKKAKMFKNQIRRLNQTEADEPIDERSLASTSYAAVAVRERLEQHFNEGLALDDKSRVVLDVYAGAVTRESRRAGGIDERILLRGERDKNRFDVRHHAVDAAVMTLLNRSVALTLEQRSQLRRTFYEQGLDKLDRNQLKPEEDWRDFTGLAPASQEKFLEWRKAATILGDLLAEAIEDDSIAVVSPLRLRPQNGSVHLETISAVKKQTLGSDWPADAVKRIVDPEIYLAMKDALGKLKELPEDSARSLELPDGRFVEADDEVLFFPENAASILTPRGVAEIGGSIHHARLYGWLTKKGELKVGMLRVYGAEFPWLMRESGSRNVLSMPIHRGSQSFRDMQDTTRKAVESGEAVEFAWITQNDELEFDPDDYIAHGGKDELRQFLGFMPECRWRVDGFKKNYQIRIRPAMLSREQLPSDIQRRLESKTLTKNESLLLKALDTGLVVAIGGLLPLETLKVIRRNNLGFPRWRGNGNLPTSFEVRSSALRALGVEG

SEQ ID NO: 155 - protein, 35 aa, synthetic construct
  source 1..35: note = linker 1 for tethered RT
SGGSSGGSSGSETPGTSESATPESSGGSSGGSSAC

SEQ ID NO: 156 - protein, 14 aa, synthetic construct
  source 1..14: note = linker 2 for tethered RT
KLGGGAPAVGGGPK

SEQ ID NO: 157 - protein, 15 aa, synthetic construct
  source 1..15: note = linker 3 for tethered RT
GGGGSGGGGSGGGGS

SEQ ID NO: 158 - protein, 25 aa, synthetic construct
  source 1..25: note = linker 4 for tethered RT
GGGGSGGGGSEAAAKGGGGSGGGGS

SEQ ID NO: 159 - protein, 30 aa, synthetic construct
  source 1..30: note = linker 5 for tethered RT
GGGGSGGGGSEAAAKEAAAKGGGGSGGGGS

SEQ ID NO: 160 - protein, 16 aa, synthetic construct
  source 1..16: note = linker 6 for tethered RT
SGSETPGTSESATPES

SEQ ID NO: 161 - protein, 1311 aa, synthetic construct
  source 1..1311: note = MG140-1 retrotransposition protein
MMYTTKSILCRRLPRLRQAENQVSSACRVRTEKGITLLEGVHEAILENSSTRCGSGVTKQPVATLEKGCSTTLTWRHLDILIAGMGWKNDSEVCVRTAKRRATKSSEVSVHQGTCCVDTGDFTDLTDNLSFVESNDGDEPSIGGQDEPNEEETSLEAGGEIEGTHANFLGEATLEVEEIQALEDPQPNLEIQEQAEMPNQEIQAQVDELPDQENQGEVNLRGRPIVDGNKIYYEYNSESGGAWECGQCPEAFPDVKKLESHYRGTHLDCVVKFNCSKCGRNFVANGILIHYRKWCKGRPIRVDPDRNPHQCSECDYSAASKRGLSQHERHRHPELRNLKRIAQRGEDARRKRTARKLIRPPGRGGKLWSAEEDDILERLCIVHQGTRLINMAIAGTGLLPGKTNLHIGERRRQWKEMKAKQVEEGLSEAMANISLEPPVLPTQRCLTELETYLEDVKGIAVKSDIGTTLWACLNDHVNGQALQSEQIDEITKKIVIELGKANPRAKRTGKTNRKKGKKANNGATEFSRIQRLFATRRKVLVKELLDGKRDADCPLDVKVVEQTYQGRFGGESKIVNLQGFPAPESLADNSELLRPINRLEVRQALGGMKNDSATGPDGVKVLPVKNLENRTGTISLILNAWLYSGIVPKGTKANRSILLPKTEEGLEDVGNWRPLTISSVVLRCYTKILAKRLLKALPLNERQKGFRQLPGCSENVTLVNEVISMAKQDSKELAIVFLDLAKAFDTVSHDHLVKSLKRFGVDMKFIDIVVQLYAEASTSFTVGLKMTDIILMLCGVKQGDPLSPILFLACMDPLMCSLETRGAGLLLAHGVTVTTMAYADDTAVVAGSKAGMEKNLELVKEFCLETGLKLNVKKSVGFHLRPIGKSYTVNEGSQFECGGEAFPWVMPGSVTKYLGAKFDPWRGIPVVDPCKKLEGWAQRIHRAPLKPRQKVSLLSDYACARLMYHMSTATPSRGRLDNLDSIVRYWVKRWLKLSDSTNTHFFYTGWKEGGLGISKFAASVPHMIVGKFEAVLRSKDPVLVTLSGIRNLRQRVDKIKEKYHVCGLKTDTQKASWREEESKSWAKLISQGKGVECMAGNPQSNTWINGESFMTESEYIAALQLRTNTYPTRECTNRGRAGANIMCRRCGLAVETIGHISGWCLEVKDNRIARHNRIVYKVKAMAEKKGFRTLLEPKVKVDGRTLVPDLIIYDGASQKAIVIDPTVVWDDSGTALDDAARRKVEKYTCIIPAVKTLTGCKEVRIQALVMGCRGSWHGGNDGLVQPLGWKRHDIKNLCLLTLCGTLKLIRYFMDK

SEQ ID NO: 162 - protein, 1021 aa, synthetic construct
  source 1..1021: note = MG140-2 retrotransposition protein
MYILRNVIQTQLTKNQSGSISAFGAIFPVIPKLVLVYMHVVPXXXXXXXXXXALIKYFPDRSLESIKGARKNLKYKEILSSLKEAIASNNLTAPSFNDTQNISVESINPDSPMSSLRRSNRVLPASPLNLNSRRRRLPKRPDAEPDPESDPDPDPDPLPASLPNPIIDDDPFISAIRNSYDCDQELKRLCELGFDLTLDYNELNNYIKNRHTYPYKSNKVTKNTDTTNYRRKIKLKRYARFQQMYRRNKRNLADMIINDKEEASVFPTEESIRQTYQNLYESVSPADDHPITDYKVSGSCYFPIDTAELRNHLKTMNASSPGVDNVTLQHLRELSPDYILTILNFQLWAMTQMETWKTNKTILIPKKNEGLENASNWRPITLSSMFTRLLHRILASRISNNTSLNPRQKAFVPVDGCAQNTLLLDNLINSARQEHKQLSIFGIDLSKAFDMVSINSIRRALRRHCIEEQLIEYIIDAYSDATTSITCGSITINNIKLLRGVKQGDPLSPILFNLIIDELIDILPPEIGGFVGESRVNCLAFADDIILISESKVGMEQLIHKTEDFFNKRSMKINGDKCFSLRLSTTKKDRAPLIIKEPSYKIDGNWVKATGYDDFFKYLGVKFNPHGKMKPNINQLETMLHRVKQAPLKPYQKLELLRNNVIPKILHEMVLGRITKGLLLAYDTKIRGFVASILDLPHDIPKSFYYSKIKEGGLGLPSLEYSIPRSLLRRVEKMQYSNDEVIKSLYNHHLTEKLRNKCLTLTEMLDIPSALSITNHNKFKNDLYSKIDGKPLAEFKSNDSGQLWLTGKTTIVTGKKFKQLVKLRIGRLATLENCNRGRDVNKSCRKCSRVNESLQHVIQHCHFTHFDRMRRHDAVAELLKQKSLENGYTVMWEPVFTLTGEKLKPDLVVITENTINVVDVSIVTENMRFQHCNTPSTLEGAWDWKVVQYEKEELTNQLKASFGEKPVWYGALILSLRGIWCSKNDITLKRLNISKSIKELIIVRSMEHSVTIWSHFMNSVI

SEQ ID NO: 163 - protein, 1120 aa, synthetic construct
  source 1..1120: note = MG140-3 retrotransposition protein
MSHSTAAASSGAATGPIVIRYPVNTTNGGTTGEQACFFAESSNCGLAFVDNKSFVDHLLRAHKATRDQIQYICSHCHRQFEKIESVRSHHNICKRKEAVAPDLDARLPVECEVDGCSRRFTTTSGMRLHVKKAHPIEYHASIPQSKRNLWSEGEMRMLARMELDNPGLTNARMNELLHSLHPSRSVDVIRHMRGRNTRYREIMEELVLIGVPEDSDSQAEKTAEPEPEGRINECQLEELVKTHSQIDDARYQASIEYVRRVLRSDDPGEFFNDWLFSCFPGKEGRRIQRRKRERLPPRNAKQKRAAEFRVLQELWRKDRSRLATVILDKMPPTAKEPPIGDIEKVYTTRFERPSPEDQHEFTSKPIEEPMEMVRFITVEEVLKNLKAMKSNNAPGLDSNITMKRLRSLPLPCLQLVFNCWLAIGKAPQSMKQCRSKLLPKGAEGLDDVNNWRPLTIGSLLIRLYTRILAMRLQSKVQLHPRQKAFQPLDGCGENIAIVSSLLQDAHERKKELNIIFLDIAKAFDCVSHHSIQRALNRFGLPRAFRRVIEDLYDGATTVFQTSEGDSKTLGISSGVKQGCPLSPVLFNMVMDELIADAPSTEWGYELHDESVGLLAFADDIALVSHSRAMMSHALDYAAGFFEKRNLQLNARKCIGLSIKKAPRRKVMRIEMGSIWSLRNGSDNIPIKMLSPADMARYLGALFSPSGKQTIDLATMKGWITSIEKSRLKPHQKLVMLRTYLLPRVLHHLTIGEPNATTLRRVERELRNSVKRFLKLPVATATPFFHISTKEGGLELPPLLETIAKRKLKWEIRLQKSKDSLIRAVADSPKFRKQFDKARAWIGVPVINRPSDINRRIRELNNGRFERFTSELAVQSRCHRALASNPLRNDWLTGHNPGLYASQFIDALKLVTSQLPTREALNRGNPQADKRCRGCGFSVENQKHVISNCPLVQQERHLRHNRVAQLFARYAKEKGWNIIAEPRIRNPSGEIMRPDIVLRRDDNVAIVDIQIPYEDGGREQLAERYRQKCSKYRQLSTHIQHVLGVTNHTIGAIIVGACGTWCELNNPILDYIGVNTTAIKKNLSIEALRGTLKIFGQFKNRVFRNERVHPSQRPSSGPPVP

SEQ ID NO: 164 - protein, 1221 aa, synthetic construct
  source 1..1221: note = MG140-4 retrotransposition protein
MVTIYTEFKTDPGAGARVVALRVDAGAKAGYVILRSEGVHGHGYSGSGSRDRALSAAGKIDEPMETLDRKSSFRLPFKILIFESGRREMDGELSPSLDFVNRALDVQESREEEALTLGSEEPTEPLSNGSVYMPASSTERGIADLAEDGQTGKLLIPMPLRTVACPCNQVFCNVYEFEIHMERAHMGIDVKYTCDLCGKHCLRVHGAKIHRSLCRGNTIRPVIPRPWKCEACEEAFRSKSGLSQHKRHRHPALRNLERKAKYVKEPGQAKPLFKATKLWSIEETKRLLELENEFQGNKNINKLIAAQLAGKSNKQVSDRRRTVHKAKTNISQDKGVTAGRNEDRVTGPGMAVSETVTDPEAFWDFVTGARNSGVEGESHQKTLQVLVDLLQEGNVERACSQVSEILADITPVTKPQSKSKKGQGPKNRRKSQAKAEAYRHAQQLFETNKKSLVAELLEGAESTKCPLSVETVYEAYKARFETESPEVDMSHFPPPVNGMDCDNILKPITGEEVYKAVRKTRPDSASGPDKIDVRSIRKWDPRGIKLAAVFNIFLLTGKVPDAVRPNRSILLYKGGETTQVGNWRPLTIGCMVLRLYTKVLAARFMFATPISPCQRGFVSGGSCNENVHLVEGLVRDAKRRNKPIGVCFLDLAKAFDTVSHKHVLAGLTRFGASKHVTRIVEDLYRGASTRFTIPDGTTGEIEMKRGVKQGDPLSPVLFNIALDPLFCLVEKAGVPYELEDGTPVSVAGYADDTMVVSNNKNDLQANINLVEEFCRAAKLKLNAKKSYAYTIRPIAKTYVVNCGDQLRIEAEAITWIEPGDTAKYLGVEQSPWIRKVKDNPTEDLKSWCSKLGRAPLKGRQKLLLLSRHVLPKLKYRLANSDPSKEVLAGLDSVSREYTKRWMNLPACVSSAFLHCSVQDGGVGLPSLATEVPLDKIGSMSRLIGSQDGHVKRLAKAIGIEEQLETTCRRWEIRRPLNKMRCVVNEIRKRRRVEWENLGSQGPRGPYWRRCRASNGWMRRDVLSEGEHTVALQLRTNTYPTREAMSRGRKGTNVMCRRCGQSVETLGHITGQCLAVKGNRIKRHNKVCGILVSAAQSQSWEVMIEPHFKVEDKTYIPDLVFLRGEQAVIVDPTVVWESNSNSLSEAARKKVVKYNPILKTVKDLTGKSSVLLFGFPVGGRGTWCRGNNKVLDALGIPRSKAQYICLTVLGDTLRMLRVFMDK

SEQ ID NO: 165 - protein, 1355 aa, synthetic construct
  source 1..1355: note = MG140-5 retrotransposition protein
MAERNCSATYIEGATAPSSASSGVGAGDDCPEVVDPPGTATCEVCDAKYRTGRGLSLHQRSRHPEWYHSRKGPAFVRPGWTREEMVLLVRGEVRLVRAARRRGEEGRVKVNAELCRQFPGKKRDSIVNVRKTKNYRDLRARLEIELEEESDEEVERVVPAPEVGLVPVEMREGGGGGEVGLVASGGGGDLSPTPSQVERKWVTPVPKDRKGPKLRWGEELLEEVAREELRLSGLNTRFMNAALRNSFPSRTLEAIKGMRRKPKYKLLLASLCAPNPAVTPPGPSQSEEGTMLPEVEGSGEGCSPEREFVTPTVSVNFTGPLQPTFVEGISPPSVIRLPVASDPPKGGRPEIVSDECNVTGLVHMDSVDHDCTLVPTESTIGDITLCDHSVVEIDSLLVDTPPRRREGEVIESTVRDDRRGDEGGEVRLPTEPDEDSESESEPSSQPCNPRQGDVSQTVGEGGGRTVAGREPMDYETWEAELREELVCAQGFLAGMDSLEFLDFQPGQLSREHREMLDSEYQRWVELELGSSHRRKGPRRRARRREAAGRKEAAGPAEAGGRRKRRRTEYARVQKLYRSNRGECSRKVLSGEWRSEETPSIPLEDQVVFWSRVFGEESVPDTRTGSPQGMVLWGLVEPITVEEIFSTLRKTKDGAVGLDKISRKEISKLNPRALQAHFNLWLYAGYQPIEFRRSRTVLIPKVQEPSGPGQFRPIAIGSFISRVFHRLLAERLSGLLEFQSRQRAFVKGDGIADNVFLLRCLLRDTCVDLKPMCLAFLDVSKAFDSVSHATLLLAAERMGAPGPFISYLRTLYSEASTVLHVDGRFSDSLKQNRGVRQGDPLSPLLFNCVIDWALASLDTEMGKVVGGGPRLNHLAFADDVVIIAESVVGLQHLCGQFERSLGRCGLTLNVEKSRTLRIAVDGKAKRWVCEPTPFVSLAGGLMPAVTITQAYKYLGVHISARERDATPEELLTRGLNQLKAAPLKPQQRMYMLRTHLLPKLHHKLVLSRSRGGVLNRLDRLVRKSVRSWLALPHDTTNVFIHCDSRHGGLGIPALRLTIPLMKSARLRRLAALRDPVFVALIASSRTFAEEVRRCGEPVKIGDSTVTSAPAVKEALAEQLYSSADGYGLRSSAGVPYVHSWVSDGTALMSGSAYIHAIQVRGATLATKKRAARGRPDANTACECCGRTETLGHVLQVCHRTWGSRIKRHDALMEKFLHSLEIRGGSILRAPVIPVVGGSPQKPDGVIYFQSHCWVVDASVVADNADLDNAHLSKCAKYDTPAVRDWCQLNWPSHEGVRGSIRFGALIFNWRGVMSRRSARMCDELKVPRATVKLFAVGVVEAGWRMFREFHRSTAQW

SEQ ID NO: 166 - protein, 1109 aa, synthetic construct
  source 1..1109: note = MG140-6 retrotransposition protein
MPAGTSPPVRWQDKETVPVIAAESDGRCLDCGKQFKGQRGLSLHSRSAHPELYHKKGSAEIAQTIREQTRTRWDGEESAVMAHEEVRLLRQGCMELNKELSKFMTGRSFHSVKSHRRQQSYRALVKAYVPTTGGLGVKEVAIPPRKTTRVVGEMAPRPHADPREDEVGQPLQRPAARVAEACPPRLHSPPQQSTNQPPAEAAEVAFPWPNPLDEHEVELPETVGIDTPTRAKVAPTQEQEIHAGDEFDWRTPIRQTIIDLATGINIQPELLQSSTQNPPADSGRLQNLIDQDIMELLPPVVRKGQNMRPGVQRRVAQSSREKRRAAYSRTQALYKKSRTSCARTVLTGKWREVAPNLSLREQEAFWAPLLETPSIPDRRAPPGDGAPEWDIMAPITTDEVARHLRGMKDGATGPDNRTLNDVRKLGVAALACRFNVWMLTGIAPEAFRHGVTVLIPKTPEGAEPHDYRPITIGPILGRAFHRILAERIERHYRICGRQKAFRKGDGIGENTFLLRTVIADRKARNQSTNVAFLDVSKAFDSVSHDSIFLAAASAGIPDPLVTYIKSVYAGSQTQLRVDGTLSRAISVNRGVKQGDPLSPVLFNSVIDLALRKIDDEIGVSIGTDKLSCLAFADDLVLLASTPRGLQSQFKNIELALGKSGLKLNVNKSATIRLDVDGKRKTWVCNPSDFLRGQDGQLVKAMSITDGYKYLGNSVSAGVTLGSTVQDLQRGVRELTAAPLKPQQRMYILRNNLIPSLHHTAVLGCLHKKSLKFLDQITRAAARAWLRLPKDTPLAFFHADYQDGGLSIPSLRWTIPLMKTKRMAGAVASRDPMVRAIAQLPIFARERRRWSAPLAAFGVPIINGAGLKRAMAVGLHTSVDGHGLAGSRVTGYVNHWMVSGTALMSGSGFVNCVRIKGNLPYTKARAARGRPERSVKCDACRGHETLGHILQTCPRTHQPRNDRHDRVNKYLTSTLGKLGFTTRVEPAIATPAGVRYPDLIVWKGDTCAVIDTTIVADNFDPDDAHERKVVYYDTPAIRTWCADISGVPADKIKFSACVLTWRGMPSTRSVRELQALGVSKANWGLMSVKTLEGAVESYAHFGKSTAGFSG

SEQ ID NO: 167 - protein, 1151 aa, synthetic construct
  source 1..1151: note = MG140-7 retrotransposition protein
MPLVSEVNDGECVECGKQYKNKRGLAIHERSAHAEIYHARCATIIEETHRTQRKSRWDSEESAVMARAESKLVRQGLYAINQALVKVTAGRTLEAIKSHRKLPAYRQMVRSYLRTTGGLIVDEAVVPARIVAEVTGGATSGPQDDNSRQVDDRSSPVATRVAEVRSPGPQPATLAFASGPAGPTGRSNGRNMTDNQITTMADVHQVLTGRIPSGAICPPDGKNKRNVTPRPEARVAETRPLSPIITRWSDDETDGDPLPETQNVNTPVREDRERVSQGIAEGIVGGYDWRAPVKTELLNLAIDANICPELLHEVLLSPCGDRELLQELIDVDLLGFFPPAERPRRNVRRRPEQQAPVTSRAKRRAAYSRVQALYKKSRTSCARTILAGKWREVAPSVELREQVAYWKTLFEQESQEDSREPPAEGPPEWEIVNPVTKDEVARHMRGLKDGAAGPDGKLRKDLKGLSTGALAARFNLWLLAGMAPDAFREGVTVLIPKSNDSTLPQDHRPITLGPILCRLYHRILAERVERHYRISERQKAFRRGDGLAENCYILRTVIDDRKARCQATNIAFIDVSKAFDSVSHESIFLAAASAGIPDPLVDYVRSVYGGLRTRIRANGELSEVIAVNRGVRQGDPLSPVLFNAVIDLALRHIDPEIGVKVDSERLSCLAFADDLVLLASTPQGLQKQFSGVEKALCRSGLALNVGKSATLRLDVHGKRKRWACNPVGFLKCRNGGTMRAMSVTDGYMYLGNTVSAGVASEKSVLILKAGISELTQAPLKPQQRMYILRNNLIPSLMHSAVLGSISKKSLKFLDTMNRAAVRSWLRLPRDTPFGYFHADFRDGGLSVTPLLWTVPLLRTKRMTKLVASPDPVARAVSRLPIFARERNRWSRPLSAYGLPIRDAVGIKRAMAEGLHTSVDGRGLNGSFASGHVNAWMTSGTARMTGSGYVNCIRIKGNLPYTKARAARGRPEKPIRCDACNEVESLGHILQRCSRTHQPRNDRHDKINKFLTQSLKKLGFHTQVEPPIPTPQGVRYPDLVAWRDGRCVVIDTTVVADNRNPDEAHARKATYYDTAGVREWCADKSGVPAKDISMSACALTWRGIPSQRSVRELATWGITKSHWQVMSIQALEGSVKCYAHFFHSTSGTRAVP

SEQ ID NO: 168 - protein, 1056 aa, synthetic construct
  source 1..1056: note = MG140-8 retrotransposition protein
MYPTSAEVPQPCPVCLSSLIDPKQIRDHFRKKHHGVLMHWTCRKCGRFWPNNKSAASHYRYCIKSLPSLEGPSKSHKCIECGGSFSTLAGLQLHRKRKHPEAYNESLPRPTGKNRPWGDDELKRLAAVELDSGGTKHINIKCQKHLPHRTIEAIASIRKTDRYRIILREIRSSRSISRETREEATTSTPDSSNVLERLTSRIAELKSGDYSPSVEAILAYTERCLEDRNASSGLSLLPSEMYMPKPTSASKINRGMRTPFRPQNRTQRRRQHYQQVQLLYKRDRKQAAGVILDGSPLHVVQPDVEKVDEIFRSRFSRPSPPDDAEFISSPAGVLNMDYITAGEIQQCRDSMKKNNAPGPDRNITMDVLLALELPVLELLFNTWLALKQVPAAFKTARTILIPKSGDTSDPNNWRPITICSLISRLYAKLLASRLSKCANLSERQKAFRPVDGCGENTAILSAVIAQARKTKSQLHVVFLDLAKAFDTIPHTSIVRALKRKALPGHFIDVVENLYTEATTSISVGGKNTSSMPLTSGVKQGCPLSPILFNLVLDELITLIGDDNGVDLNDKKIAILAFADDLVLLSPTTDGMETNLKLCEGFFDKRSMKLNARKSVSLSIVRAHKRKTMLTDERPKWKVHGEFLPTIKHTEEIKYLGVRYSAAGRSIAKFPKLDQWLQRLKKAPLKPQQRIQMVRSTITSRLIHTLRLSRVHAKLLKDLDRKIRSFVKSVLHLPSGTSTDFFYIPVLKGGLGLQEFMTLIPAAKLKLINSMKKSSDQAVIAAMEVDHWLREERWCRKVTLNQGNKNDAERRRLARYINSPRGKSQVGFANLPGQCRWLEGGAKLTGHEYIVGCHLMSNTLPVRTRTFHGGRDRVVTCRYCPGVLETPSHALQSCPVVRNAVTKRHDLILTKLQHFLTPNYDSVIREPWFNGREGRMNPDLVLKQGKMVYVVDLTIPYDSSPEFIDSQAQRKVAKYDTLKPLLQQKFQAERVEVIGLALGARGMYTSAGIQTCLKLGLSDRQRRYMGMMALRLTCAVWGIFRSQPSGLFNKVPDTGTT

SEQ ID NO: 169 - protein, 1009 aa, synthetic construct
  source 1..1009: note = MG140-9 retrotransposition protein
MEVAGITPGNGEAIGVEVVFPDTQERVQMGVDEDDNTRHPVSEIEEGAGINPGNGEEVDVDAIHSDSQEQMRVDEDENAGHPVSENEEVVGNAPDNGELEVAGVTPGNGDLVDVHLVSQAAGIDEAVGSGLHVGAGIAPSESVEAFRAALRSLVVEGGLSGLVRDAVVNVLNDEGGERIGSVLKDLVQAIGLENATTPGTARRPGHRGGFGRHRHVGNKAASMYAGFQAMMTRNPSEVARWLWEGRAGEEGNVVPPMDHLVRIFGSVMSVDGVEDNEQIASCQEGVKVFYPVTSQDLDKALNKANASAPGLDGLRIESLKRMSGDNKSNAVALVNLALLAFGNYERTVRTVMIPKSTEHLEDADNWRPIAIASHIIRVGHRVLAHRLESQVKLHPAQRGFTRGDGLARNVWLLDAIIKHARVNNRTLCVVSLDIKKAFPSVSHSSIARAVDRFGCSPVFCEYIRSVYRDNATVLQCGKSVSDAILVKRGVRQGDPMSSVLFNMVMDELLCLLDPALGYKFDGTCVKAMAYADDLVLVARSVGAMKKLLTGTEEFLLKRGLMLNEKKSVALHLRRGKRAVVLSLEEVWSLREGAIGMVSEIKSLTYLGVRFGPYGKMNYDTKPLSDALGRLCRAPLKPDQKLLLLKTHLLPKALHSLTLGCCDKKLLKTLDMRVQHAVRSILHIKKDVPCAFIHGPSKHGGLGVMSFVADVPRHVCNRIEGVQLAGEGGEMRALVDSFYFESILRKLRTPATQVPDEYVAHLSRKNCRRNMSVRLKQADMSSKYDTRGITEVAEHGDSRAWLASKPVFWPARTYVNAVQWRCLSITCRSRVSHGRAGDRLCRTGCGKIETAFHISQVCPSTHLARVARHDRIVQLIKRSAESKGHAVVVEPRITTAAGIRKPDLVIANARSKTVFVVDVHVAWKGLRQAFDAKVKKYGRHKEISDFGRTLLPEAERVQFGAIVVSPRVIWAGANEQVVNGLQLPHGIRKVVLASCVEGTMKILSAFNAVQ

SEQ ID NO: 170 - protein, 1347 aa, synthetic construct
  source 1..1347: note = MG140-10 retrotransposition protein
MHRSSPERRILDGGAAAPPSTLAGPDGNEPGSWVTCGLCGRRFASARGLSQHERKEHPEHYHSVNIPKVVRQGWSNDECVLVAREELRLVREGKKRGVTGRVNVNADLCRAFPHRTMDAMKGLRKNLKYLSLRTRLADEEMVRPPAEAPESPERVFTVGDEDRRWTTPEPKDRRGPKVRWSNILLDDVAMCEAQLSLGGCTNYNIELHKIFPERTLEGIKGMRRLAKYRVRVARYLAEEAAQGTPPGMDRSPHGPSGEREGDMPRCGRNESSSGSEGPAFDCGDTPPVPPCNPGRLDENRTVRDGDASGGDSPRDNRRPRGEDIGPRERGLGAHTERTSPAREVGEGASRPGETGVVPPIPLCNPGRQDASQTVRDGDAVGGTTMVDTVSLVDVSSPSWASQIDLLDLADGTEAHVNVETDSPAGSPAGGSSWACPAEEIPEAADPSEPMLEVPSANTDNINRDHDSWRESLRQELVLAQGYFVGWDSLEFLDFRPGQLSREHKMLIDSEYEEWVRLELGSAHKRKGPRRRARRREAAVREEATGPAAPMSKRKRRRADYARVQKLYRANRGECSRKILSGEWHTEAPPSIPLEDQVFFWSRVFGEASQVDERVVHPQGMVLWSLVRAITADEIYAALRKSKQGAAGLDKISRDDIRKFDPRALLAHFNLWLYVGYQPAEFRRSRTVLIPKVPDPSGPGEFRPIAISSYISRVFHRLLAGRLSGLLEFNSRQRAFVKGDGIADNVFLLRCLLRDRCDALKPLSVAFLDVSKAFDSVSHASLLLAAERMGVPGPFISYLRSLYTEASTVLQVDGQLSGPMVQNRGVKQGDPLSPLLFNCVIDWALASLDPEMGVIAGEGPRLNHLAFADDVVIICQSSIGCQHLCRQFEKALGRCGLRLNADKSRTLRIAVDGKAKKWVCDPNPFLSLAGGVLPAIPITQGYKYLGVTISARERDATPEELLRRGLKHLTEAPLKPQQRLYFLRNHLLPKLHHRLVLARTRGGVLRQLDKLVRRGVRQWLKLPHDATNAYLHAEVRDGGLGIPSLRATIPFMKRDRLERLAGSSDPMISHMVANSGTFARECANCSRPPVRVGSTLVMSRDEARRVTAEQLHASADGYGLAPSAAVPFIHSWVSDGTALMTGGAFIHAVQIRGATVSTRRRSARGRPEASYSCDACGRPETLGHILQVCHRTWGHRIKRHDAVLEKLLHELERRGWSVLRAPVIKVRCGSPQIPDGIAYKDGICWVIDASVVADNADLDDAHLSKCTKYDTPAVRDWCQSNWPSEVAAGVVRFGALVFSWRGMMSPRSARMCHELGIPQGNMKLMACCVVEWGWRIYRVFSRSTASWV

SEQ ID NO: 171 - protein, 1314 aa, synthetic construct
  source 1..1314: note = MG140-11 retrotransposition protein
MSLGKSDGQCAASTSRCEGGAQGPARTPPLQRGTPPPAQVTPGLSHSTRDNPEVICLDTPPAMPATSLPATLTTTTVTTVACGGPIMSTLGLPTGGHITSPRPSPASDQQTPPGAVWVTPMERTPIPSGEVERRQQGAVTPSPPPPQETSRDEGDSDGPWRVRLGRRARRRLSSGSSGGKSPPTTSADNNNNSLNLQNNLINNNVEVSMSNNILQQANAFLVLGTSVASGPSPLDDGGAPGDMRAEDHSAGHPSVPVSVCGVMGRPRGARASVDSGANEQTPSEPQRGGGGHHRRPRRVEVAPVQPFRGQPAPAVAARQRRRQRVVARDALVGRAEAVASLADLEEFAASVALFFGEEAVGVARGDAPGARDRPVRLRAARGRRGEGRVPARDGANVERGPVPAGPQQRQLGEGRGDWTREAKRIQALYRVNRRRAIREVLQGPAEFCRVPTRRVQAYFEDLYRGGERLDNAGAEAERVDPPRREDVELLMAPFTEREVDCRIRRMNNSAPGPDGLTYRDLRAADPGARLLAAFFNACYRLEAVPASWKTSNTVLVHKKDDPGLLENWRPLALGDTTPKLFAALVADRLTGWAINNNKLSPAQKGFLRDEGCFEHNFVLQEILTEARRARRQAVVAWLDLSNAFGSVPHAVIRRALVRAGVPGGLINVWGSMYDGCTTRVRTADGYTAPVPIRSGVRQGCPLSPIVFDFAIDSVLRAVTAVDAGFDLSGLRFSTLAYADDIALVADSPEGMRRLLAAAEDGASSVGLRFNPAKCATLHIGEGAGGRVLPTTFVIQGQSVHHLACGEPYKHLGVPTGSAVDQTPYATIGGLLEDVRAVDRSLLAPWQRVETVAVNLLPRLDFLLRGATVEKRPLTVADKTIRRTAKAWLNLPQRASAEVVYLPPSLGGCGLFPLADLADVLSVAHVFRMLTASDAAVRELAWSSLRGVVSRRIGRRPSNDDIAAFLSGSLEGRMRDGGEKSLWSRARNAARRQSERLSLRRVWSEATGEMIVECRGTRGDTVRVPPEARSQVITRLRSAVMAFYCSRLSSKPDQGKVFEVSSRARVSNHFVRGGSFTRFADWRFIHRARLDVLPLNGARRWGEGDKRCRRCGQAAETLPHVICHCGVHSAAIQLRHDAVLHRLWRACRMPGEKRVNQRVEGVHGELAELRPDLVIRHEPTKCVVICDVTVPFENRRQAFHDARARKLAKYSPLAEALRREGYRVVVTAFVVGALGSWDPANEAVLRLLRIGNAYGSMMRRLVVSDSIRWSRDIYVGHVSGVRQYAAPPRPAVDGALATPPRAIRRRWPANRVNVN

SEQ ID NO: 172 - protein, 969 aa, synthetic construct
  source 1..969: note = MG140-12 retrotransposition protein
MAGLQLHRKRKHPEAYNESLPRPTGKNRPWGDDELKRLAAVELDSGGTKHINIKCQKHLPHRTIEAIASIRKTDRYRIILREIRSSRSISRETREEATTSTPDSSNVLERLTSRIAELKSGDYSPSVEAILAYTERCLEDRNASSGLSLLPSEMYMPKPTSASKINRGMRTPFRPQNRTQRRRQHYQQVQLLYKRDRKQAAGVILDGSPLHVVQPDVEKVDEIFRSRFSRPSPPDDAEFISSPAGVLNMDYITAGEIQQCRDSMKKNNAPGPDRNITMDVLLALELPVLELLFNTWLALKQVPAAFKTARTILIPKSGDTSDPNNWRPITICSLISRLYAKLLASRLSKCANLSERQKAFRPVDGCGENTAILSAVIAQARKTKSQLHVVFLDLAKAFDTIPHTSIVRALKRKALPGHFIDVVENLYTEATTSISVGGKNTSSMPLTSGVKQGCPLSPILFNLVLDELITLIGDDNGVDLNDKKIAILAFADDLVLLSPTTDGMETNLKLCEGFFDKRSMKLNARKSVSLSIVRAHKRKTMLTDERPKWKVHGEFLPTIKHTEEIKYLGVRYSAAGRSIAKFPKLDQWLQRLKKAPLKPQQRIQMVRSTITSRLIHTLRLSRVHAKLLKDLDRKIRSFVKSVLHLPSGTSTDFFYIPVLKGGLGLQEFMTLIPAAKLKLINSMKKSSDQAVIAAMEVDHWLREERWCRKVTLNQGNKNDAERRRLARYINSPRGKSQVGFANLPGQCRWLEGGAKLTGHEYIVGCHLMSNTLPVRTRTFHGGRDRVVTCRYCPGVLETPSHALQSCPVVRNAVTKRHDLILTKLQHFLTPNYDSVIREPWFNGREGRMNPDLVLKQGKMVYVVDLTIPYDSSPEFIDSQAQRKVAKYDTLKPLLQQKFQAERVEVIGLALGARGMYTSAGIQTCLKLGLSDRQRRYMGMMALRLTCAVWGIFRSQPSGLFNKVPDTGTT

SEQ ID NO: 173 - protein, 1269 aa, synthetic construct
  source 1..1269: note = MG140-13 retrotransposition protein
MDAHVDLALPCIRVCSPKCIKPLATTTRNKTSVLSVMEQVPSRVDSDSLHGAQSIGGAVHSCVDCGRSFDSVRGLKQHVNRFCKGKAAGSSAEGSEVGTVAESSAGGDVQTSTTELIQCPAVTTSKTGEGSATCSQKLEHVQTPSRQSADDSVEDLDPRMCVHASTGTHCEKCQWCGRCWLTLQSLRQHQRRTHREEYQTKLCEEHQLKKARWTKEEEVRLAETEVELRKSGQFRNLNVELAERFPTRTVESIKARRHRSETYMQLVQELSEHCPGLLEMASIRGSTSTIGEQGDAHGDAPSEVASTEQADNYAVLCAASEFPDQNHVSSVQTSAVVHHSIREENEFDDSIFGPVSGSTAVGIGAEMSEKKDTTAQSPSELSDWKNPIYYYIEGLPVATTVDDSGERLLDRAFEMEKGALTDVRDGLIDRHAQQFLWITRDGQKRHQRKGDSRREKRESRKSRLGQDTSAAEGTGGPSRRAKRRQLYALLQKLYEKDRNHAAELVINSEWQGLLEKKVVNKEAQVLYWKQLFERRSVPDQRPYSTQVVKWDLLEPITVEEVQKQLLQAKETAPGPDGVELVDLHSYTARHLCKAFNLWLLRGRVPEALTKSRTVLIPKKLGAEDPRDFRPITVSSLILRIFHKVLMDRLQRHISINPRQKGFVPVDGCFENLYLLDAILWRAKRYLRPLFVAFLDIKKAFDSVNHDSLVRALKKNGIPSPLCDYLSSNLRLGKTELHGQPVEMRRGVKQGDPVSPFEFNLVMDDAASYLNQHLGVEFDDGEQLTHGFFADDTFIVAPSLAALQQQLTKFESGLQANGLELNVDKCYWFGIEVDGKHKRWFQDMRGELNFLGEKVTRISPADTFKYLGVHLNVFGKRMFDPARLVTALHSTTSAPLKPQQRIYILKNYIIPRFLHQLVLGKVSQQLLASVDRIVRKFVRQWIAFPTDTPLGVFYAPVRHGGLGLPQLQGLIPNLRMIRLQRVLSAESDPLILHISADTEFADDVYKRCGWPARVKGLRIGSKKELNDYWVNSLYSSVDGRGLREASNVPQVHTWVDDGSKILSGSQYIHWLKVRYNLEPTRSRKSRGREENPRVCDKGCCAVETLAHIVQSCPATWGIRIRRHNTVLALLGQCLSRKGWKMKLEPQIRYRSTTLKPDLVAARDGRALVVDVQVVADSTEHTLHAAHCTKLQKYDVPEVLEYAREVAGSPTAPVVVTSCTINWRGCWSESLAGALRQAGLSWAQVRLLALRALQGTASCYIGFCRTAGACS

SEQ ID NO: 174 - protein, 1221 aa, synthetic construct
  source 1..1221: note = MG140-14 retrotransposition protein
MKRLDHQNRPVARFSCAGQNDELVHRARKKCSRCLGLTSLFSVHLVTKMNLMNMGSPPGDALQVKSEGLGTASGIGNGIDGCCPVCGKTYKGSRGMRIHWRAVHPESFHSRETTRLESAERKTKCRWSQEETSALALHESRIVRRGCPTGRRDLNEQLARLMSGRTSEAIKSHRRAESYRELVAAYERMGSVPRTRELPRETVEKADASRRVLRPRAPRGRDEVEQVSSDAVTRVAEACSPGPHPGPYGGNKREWDDHASTQPATRVAEAGHLGPYPSVGEESSGEGADRTQRVRATLVAELDPEWLPSGSDSEPGSDREQQTEYLVTMGELPSTRDVGTPARGRHPSYTEVNGDEFDWQYPLIEAILEQALSADIDPILVQVAIENSPENSDSLQRLIDHDLMGMFPPIEKPSLRGGPGPPRRAAQTARAKRRESYARIQSLYKSSRSNCARTVLNGHWRTAPPKLSMQTQMAFWRPLLETPSKQETRLPPEGVRPQWAMVCPITLEEVARHLGNMKDGAAGPDNCGRKDLRKLSAVSLACRFNLWLLTGKAPEAFKHGITVLIPKSQDGHEPKDFRPITMGSILCRLYHKILAERVERHYQISGSQKAFRKGDGLAENMYILTNVIEDRKARSQATNIAFLDVSKAFDSVSHESILLAAASAGIPHPLVRYVRSVYTGSTTRLRVDGELGPDIRVRRGVRQGDPLSPVLFNSVVDLALRQIDQEIGVSVATEKLSCLAFADDLVLLATTPRGLQTQFERIELALGESGLDLNAAKSATIRIDVSGKSKRWICNPTAFLLAKDGQVIKAIKVTEDYRYLGNAIGTSRTKGSTVQELQRGIAELSRAPLKPQQRLFILRKNLIPSLYHTAVLGRMYKKSLKFLDQIVRAAVRSWLRLPNDTPLGLFHAHYSDGGLDIPPLLLTVPLLRTKRMGRLVSSQDPIARAVAQLPIFERERKRWSAPLAAYGVSIRDGTGVRKAMGVGLHMSVDGRGLTGSRETGFVNKWMVSGDALMSGHSFVNCVRLKCNLPYTRARAARGRPDKPVACDACRSPETLAHILQSCPRTSKPRVDRHDRANKYLTEVVRRSGFATRVEPAIPTPAGIRYPDLVVWKDGLCVVVDTTIVADHKNPDDAHERKVRYYDQPAIRGWCESISGVAADEVKFSACVLTWRGVPSVRSVRELRTLGVTKSNWLLLSVKALEGGIACYSHFTNATVSFCYLP

SEQ ID NO: 175 - protein, 1023 aa, synthetic construct
  source 1..1023: note = MG140-15 retrotransposition protein
MGKDNPKAALWKEQENKAREAYFSLLTTIGRRKKDMAEAKAIKYRGKSNTHFLRPSFMSRKRSSITSMLVDGSDDKDAKRTTDDKVWKDNFNEFYKELYSPKEIEVDVLKDILDKTDISLPPRLLSKLRRRAKTSEIEKIIDTLPAGKAPGPDSLPYGIWGILRDTSPVAFCNLFNACMDRGKIVNSARKANIVLLPKEPDSFACGMYRPISLTNTDYKIIMRVWANRLGPMLNSKIGGHQLGFIPGRDGRENIINEQFLIDYYQHKGRAGAVVFLDLQKAFDRVSHEALMTIMRHHGWPEEFVGFVENVYTNNTAKLIVNGELNEESFNVASGTRQGCPLSPLLFTLIAEMLCQPIINDPEFKGMKVDDGDRKALSAYADDIAINNSCREDIDIMNAHLERFERATGMRVNKKKSEAVLVGGWIRFPPPELLFPCVRKVKYLGCPVGRLTDIDYTCTWEAMEDKLDATFRRWNRAATAPKDRMLLAKTMALSKLWYMASVIPWSIQSLRRIQKTTIRYIWGFKMHKVSMSQLQLPKKNLGLNMWSLVAKVRALNARWGLYYLTNKLSPDLHNLMHSVYNNTRIGRTDTDREPLQASGSLPGTMIKKITGSRIMSYLMDNWSRIVTRCPIFKIGDEVKFAYEDGSIWDGVGTITTEISDSFKYVVEWEENPRQNPKVIANTGTCKAMALYSNDPTAITDTHNTMGIEIDHRVMVLLRTALKKVSVKSTKHGPAFDKVEVNKHLYNGQMLGMGQIDIGKGPKVNKFVERFTEPKLLAAVRANWSSSASSAVQSFRWLLMSHALPVGSRPTPTSACVFSGEEETIEHLFYECKFAEAIWDEVYSNWLKMIQLANFELKVCTPVIMPRRNFWNTVFRGGKHMSFRNQWTIVQGIVTYHIWRTRCAAYYNNKIPPPPKAEVPFIWQHVFLTLQAEADALRDIKWWWIKRSLAMNPHQREVIQDKVLPGIEKDLATLEALQSTLTHTSQRRVSDREDGLSNTVLPYRNRYSNPYWYLSIVNPTLLEKK

SEQ ID NO: 176 - protein, 1031 aa, synthetic construct
  source 1..1031: note = MG140-16 retrotransposition protein
MAACLDRPFLPLHAAFAEPRYTTLPPCSMRIATWNVRTMNAESKPEQLAHRLQQYDIDICCITEVRWPYSGIKDVGGWKLAFSGRDDGQLRQGVGVMLSPRAAAAYIDSQPISEGVLLVKLRLKSSTLCVICAYAPTNDYPEDQKDAFFVELQHAVDRVAARNTLVLAGDFNAQVGAEDPQQWHGCLGKFALKRDTLRTSGMAIRLLDFCVTNDLVLRNTFFDHKNIHLATWTGPGDRNANQIDFMVMRRAQARAMLNCRVHRGAELETDHYLLVSSCRLQFSQPRATQRQRKSGYGSELLHDAAVQSTFASMISNESRHFYDMMDMPDTAPEELWQQYKSGMQRCADAVLRKETEPRTPWMSAKTWDHVQRKQDSYKALKHAKSEHEKVIFRQRYRQALNECRKSVKADKRAYWRAKAVALEADFAANRVHTAYKRVGLRDELDRVQSLSAGKLRRIDGTHTSSAKEKADIRKDHFQELLNCHRPVQPLVHKWVQAQQQHILQDLPSDEVPTLPEVESAVNALKNYKAAGVCGISPEMIKYGGRDGLKMLHMLISTVWQKGVVPDDWKRALIVPLFKKGDPTNIDNYRGISLLSLPGKVLAIVLKNRLQQWAEALLMEGQCGFRKGRSCNDAIFSLNGLCELTSKAGKQLHACFIDLSKAYDSVDRPLAWELFQSLGLPPKMLGLIKDLHNNTTCALQTDKDKQDSWFQVSTGFKQGDVNAPLFFNIFLDSICRYIEAKAGELGFNLAYNIDGHLTGRRKPNGSMPCWILLYADDMVIFEKNRERMQAVLATVYQALQDWGMQMSIPKTKYLCYNSAEHCAQPLEIAQHEIEQVSKFKYLGSMQTSDLSVRAEVNNRLASAANAWLKLSKLHVWDDVCISTGIKCTLYKVIVQSTLLYGSETWAFPKQQMHRLDVFQMKCLRKIYKVSLKDRVKNDIILGRCNVAKISNIVSHRRLRWLGHLARMPDERLPKRVLFGYMDGSGVRGKSQKQWVDYVREDLHFAGLSFTWWRKSQDRAVWRAAIECLLQRT

SEQ ID NO: 177 - protein, 1032 aa, synthetic construct
  source 1..1032: note = MG140-17 retrotransposition protein
MSNPNKVKKITHRFWAHKFKRKGKGKTKTNKMSNLPRPNFSIEELKKVLARKKLDTAPGPDAIPYSAYRTLNEDNLSAILEEINSKINDTPEEWLEALQWNIFKEGKKEELNNYRPIALCNTIYKIQTLLIKERMEEITTEENLIHPSQHGFTKHRTTSHNIIALKTIIHKDKLEQRETHLLFLDIAGAYDSVPHEALWCTLAKNPSIQPYAMIIQQMYSKATTQIITSVGLTDKIQIERGVRQGDPLSPLLFNLFINEVITKVYKQHRGWRTKNQNYPTLAFADDLVLCANTRRDLQTITKKVIRFLRKNHMNINTKKTIYTSSNRRRRSIHLQHNTKIKEVKKGKAVRYLGAYLSLDQPDKKESDTRIAELWKRVNLITSKKLYPHIMAEAVNALAYSKIVYSFGHTKYKRKALKEIDKKVAHLIRTKTGAYPFHTDKVHAKWREGGWGLLSLHDLYTRMMTGTLFDRILNRPNTISKKIICEALEEIGESNKEIPGSITYQALHAPPTIKQAWKIAREEGLIPINTTLNLLHPETILSAHPLVIDELNQKGISDVTTIKTNLPQSVANYLLGPINNLLPFMRRDQEMQPPQNTIQIENSRVVWTDGSLKKGENSGTAGIFYDLGNPGNKTIHIPHCNSSFEAEAIAIHAALRECPQEENIRIITDSLSVIQAINSEDSPSYVIEGIKKRIQERKGKQSRTEIIHIYSHIKKKKKKSQVWEEKIRDQEIELFPHFRQYRWGNKKADKLTNQEASKQKGIPPYAPEFMIFNKQKLKWEPLRVKDTLKREQRSKIITTTNERDQGRHPSLQQTNRSLSEIALKNPTIQASEANFLIKARSYCLPIPDRKNKPAICPKCGGLETHQHLLLECPNLEETKKQIVKKMKETLTKMAIPHIVANEWFNNEIPTYMWALGYIPKKWAQRMKRMIGGKPLTSAIAIATRITSKLTLKSFKENRNQIRRPNRRANQRNTNPTRNDTDNASDNDNTQVANATNVNVALQIDIRQAILDALEILPDPIIPTTPSLHRTTPQ

SEQ ID NO: 178 - protein, 991 aa, synthetic construct
  source 1..991: note = MG140-18 retrotransposition protein
MASTNLRITTYNCKHFHDSGENFTFIDTLMCDTNFLFLQELCLYENEFEKLLNLSNNCDFTATSAMDEKVHRIGRPFGGTAIIWNSSITGHINKVECDNNRICGLLYIMNNVTMMLLNIYMPCDKYTDDFEFIDVVNTISQLLHKHNPSHVVIGGDMNVDFIRNSPNTRVLSDFITDFNLYTCIDLPDSNVPYTFINHNNNTSRIDHFFVCESLKDAISDCNIVDNHLFSDHVPLNICFNLDVTYIAEVERPFTSKQAWYKATDFDIEKYKKRLDGLLENIIINDSMLYCSDYNCIDHKEELCELYNTVINTCITASDHIPTTSNRIKVKPGWNDNVKQLKEDALSWHHFWKINNRPRVGYVAEMHRISRARYHRAIRHIDRNASKIKSEKIAEAMLSNNSRDMWSEVKKMKGRNSKLTCSIDDCSDSNDIANIFSSKYMELYNSVPYDVDEMKKIESRIMDRIGDCSDDDYNISVRDVIDAVARLKHSKSDGSEGLFSDHFIYGTNRLFVILSLLYSLFLSHGFSPDSMILGTMIPIPKNKKKSLSHSSNYRAIALSSIFSKIFDWIILIKEHSSLCSSDLQFGFKKDTSTTQCSYSMLETIDYYNFNRSNVYVLMLDASKAFDRVNYCKLFNELLKRDISPLVLRLLLYMYTSQCLRVKWGHTLSDCFTVKNGVKQGGVLSPILFAIYTDGMLQKLESTGVGCHMGSHFTGALAYADDLTLLSPSISGLKILIEVCEQYARDFDILFNGNKSQLLFYKGRGCVSCYKDIVVNEQCVKYSNSAVHLGHTISPDDKDCILRNAKANFWKKFNIFMSDFGNLSCHVKSKLFQQYCCSMYGSPLWSLRGSAVQSLCVAWRKALRSLWRVSPRTHCDLITALSFQIPLHSNLAKIFAKFIIKCLCSKNRIVNIISHIAIRNPISCAGNNYRDLLDRNSEVDVKTLLLNWKERADTLENLVRTLHELIEIRDGLKECIGLTFDEITILITDICIH

SEQ ID NO: 179 - protein, 1094 aa, synthetic construct
  source 1..1094: note = MG140-19 retrotransposition protein
MVTIYTEFKTDPGAGARVVALRVDAGAKAGYVILRSEGVHGHGYSGSGSRDRALSAAGKIDEPMETLDRKSSFRLPFKILIFESGRREMDGELSPSLDFVNRALDVQESREEEALTLGSEEPTEPLSNGSVYMPASSTERGIADLAEDGQTGKLLIPMPLRTVACPCNQVFCNVYEFEIHMERAHMGIDVKYTCDLCGKHCLRVHGAKIHRSLCRGNTIRPVIPRPWKCEACEEAFRSKSGLSQHKRHRHPALRNLERKAKYVKEPGQAKPLFKATKLWSIEETKRLLELENEFQGNKNINKLIAAQLAGKSNKLVSDRRRTVHKAKTNISQDKGVTAGRNEDRVTGPGMAVSETVTDPEAFWDFVTGARNSGVEGESHQKTLQVLVDLLQEGNVERACSQVSEILADITPVTKPQSKSKKGQGPKNRRKSQAKAEAYRHAQQLFETNKKSLVAELLEGAESTKCPLSVETVYEAYKARFETESPEVDMSHFPPPVNGMDCDNILKPITGEEVYKAVRKTRPDSASGPDKIDVRSIRKWDPRGIKLAAVFNIFLLTGKVPDAVRPNRSILLYKGGETTQVGNWRPLTIGCMVLRLYTKVLAARFMFATPISPCQRGFVSGGSCNENVHLVEGLVRDAKRRNKPIGVCFLDLAKAFDTVSHKHVLAGLTRFGASKHVTRIVEDLYRGASTRFTIPDGTTGEIEMKRGVKQGDPLSPVLFNIALDPLFCLVEKAGVPYELEDGTPVSVAGYADDTMVVSNNKNDLQANINLVEEFCRAAKLKLNAKKSYAYTIRPIAKTYVVNCGDQLRIEAEAITWIEPGDTAKYLGVEQSPWIRKVKDNPTEDLKSWCSKLGRAPLKGRQKLLLLSRHVLPKLKYRLANSDPSKEVLAGLDSVSREYTKRWMNLPACVSSAFLHCSVQDGGVGLPSLATEVPLDKIGSMSRLIGSQDGHVKRLAKAIGIEEQLETTCRRWEIRRPLNKMRCVVNEIRKRRRVEWENLGSQGPRGPYWRRCRASNGWMRRDVLSEGEHTVALQLRTNTYPTREAMSRGRKGTNVMCRRCGQSVETLGHITRQCLAVKCNRIKRHNKVCGILVSAT

SEQ ID NO: 180 - protein, 846 aa, synthetic construct
  source 1..846: note = MG140-20 retrotransposition protein
MTGEDPQECAKCNYNMIDTKQAVDHCARKHHGMSVQWKCRKCERDWSNIRSIAAHYRHCTGRPPSPVATTATSHVCDQCERAFTGLAGLQLHRKRKHPAAYNESLPRPTGKNRLLGADELTRLAGVELDLGTSKRINLVCHDHFQHRSVDAIATIRKSKRYKDILKVVVETRSLVDEQEAGEGAQAPEPFINIVEAQLRTRFDELEGDSSPAVRDTLAYTRTSLAEGNATIGLDLLSEEVYRPRKAPDSTSNPRKRGPDFAPTTRSQKRRQLYKQIQSLYQRNRKQAVGVILDGDPIQTVFPDVDRADEVFRGRFARPSPPDDKVFNLVPGDTMNMGYITSEEISKCRSAMKKKNAPGPDKEVTMDLVLGLELTVLELIFNTWFALGQVPTAFKEARTILLPKSGDATDPNNWRPITICSLIGRLYAKLLAGRLSKCANLSERQKAFVPVDGCGENTALLSSVIAHAHKVKTQVHIAFLDLAKAFDTVPHTSILRALRRKALPEHFIAIVENLYSDANTSISVGDKSTPSIPMTSGVKQGCPLSPVLFNLVLDELIQNIGTIDGLSVGHSKLAILAFADDLVLISGTKDGLASNLRTCEELFNARSMKLNARKSMTLSLVRAHKRKTMLTDETPHWKVYGEFLPAVKHTEEVKYLGVRYTAGGRPMAKLPKLNDWLQKLKSAPLKPQQRIQIVRSTITSRVIHTLRLCRVHAKLLKNLDRKIRTFIKGVLHLPSGTSTDWFYIPIRMGGLGLQEFMSLIPAAKLKLIDGMKKSQDPTVVDAIRQEHWLKEERWCRAVSSLYGNKEQADRGRVERHISSHTGQTQIGFARLPGQCNWLEGGGKHDRS

SEQ ID NO: 181 - protein, 1019 aa, synthetic construct
  source 1..1019: note = MG140-21 retrotransposition protein
MKSRQTKTALSTPQLLNGQRVLGISGPRTASTTSWCAGRGGSSKGTAHRTGDGDQRRSGSRGEQVLLRVASLNVGSMTGKGAELVNLMSERRISIACVQETRWKGNSCRELGNGYKLLYAGEVSGRSGVGVVVKGELKESIVDVKRVNSRLMLVKLVWKGIVLNVVSAYAPQAGLGEEEKQQFWRDFDGLIFGVEKEERLMIGGDLNGHVGARAGCYREVHGNEGFGILNKEGEGILETALAHNLFIVNTKFKKKQEHLITYKSQMGISQIDYFLVRRDDVMECKDCKVLPGETLEGHHRILILDMRIKVKEDKKKRVLAEGIKWKKMQEKGGTLKQKLLTEVEWEFDSSAEGMWKKTSVVLKRCCREVLGVYKVGTRYIEKETWWWNEDVSKVVKNKKKAYKKWQESKSDEDYEEYKKTKNIAKRKVAQVKSDKFKDMYNRLETREGEKDVYRLAKERAKKKRDIDSVRCVKDEGGEVLVKNEEIRNRWGRYFSSVMNEGDSGSHCDTSGLGEFEPAEQGVEEITSVEVEKALQKMKRGKAVGPDEIPIEVWRLLGESGIYWLTRLFNKMLKGDTMPEEWRMSYVTPLYKGKGDVQDCNNYRGIKLLSHTMKLWERVIEARLRRFTGINENQFGFMPGRSTTEPIFIVRQLMEKFRGARKSMFVVFVDLEKAYDRVPRRVLWDVLMRKGVGKRYIDLIRDMYRESKTCVKTVGGLSDGFGVGVGVHQGSSLSPYLFVLVMDELLKGNVPDVPWCMLFADDMILIGETVEEVEEKLGRVMRALESNGMKVNRSKTEYVFCDWSENGLAKEVTVQDWRVGRVGQYKYLGSIVEEDGGIDKETKARIQAGWNKLREVSGVLFDKRIARRLRGKVYATVVRPVMLYGAECWPVTKIQEHTFGVAEMRMLRSMYGVTIKDRVENEYIREGLGVENIKQKMRESRLRWYGHVSRKGEEEVVSRVRDLRVGGKRRRGRPKMSWDSVLAKDMEYCGLRHDMVHDKTEWRFAIKMPTLAKLGQRQGR

SEQ ID NO: 182 - protein, 955 aa, synthetic construct
  source 1..955: note = MG140-22 retrotransposition protein
MAANLVTISYNLHGYNQGCPGINELILKLRPDIFMVQEHWLSPDNLSKLDNISDCYFVFGSSAMLDCVSSGPLVGRPFGGTAFLINKKHVSATSNVESSDRFTVIRIYNWLLINVYLPCVGTPHRDELYSDILLQLQNIISANSDCSCLIGGDFNVDLDGNSNISLLVNEFMCHNNMHRCDVLFPVSNRNTFMNEATNTGSAIDYMLSSTSDKTIAFNILDLDINLSDHSPIMAVCALDMSFLPLSTQCESCSPDDVTHLRWDHAPLCMYYEHTRLLLQPVLTNLDALLESSDSADDVFCVGSADQIYCNVVNILCESANLFVPKHKKNFYRFWWSQELDMLKSKAIESSRAWKGAGKPKHGSIFSQYKQDKLLYKKRIREECFNETKSYTNDLHDALLCKSGQAFWKTWKSKFESKSTNVLQVDGTADSGIITDKFGKYFEANCSPFSPARNEEFKKKYTELRSNYSGSPITDDQVFDVELISRLVSNMDKGKAAGLDELSSEHLKFSHPILICILTKLFNLFIAKGHIPTSFGSSYTVPIPKCDGRTRALSVDDFRGISISPVLSKLFELAILDRFSTYFTTSDHQFGFKKHLSCRNAIYCVRNVVESFVSNGSTVNVCALDLSKAFDRMNHYALFIKLIERNFPTKLLNVLETWFCASITCVKWGRNVSSFFSLHAGVRQGGVLSPILFSVFIDDIVTKVKAANVGCYMSTICASIFLYADDVLLVAPSVAGLQSLLNVCENELINLDMRINVKKSMCVRFGQRFDAPCVELVSIHGGSLKWVSSCRYLGVYFVSGRTFKCCFHSAKSQFYRAFNSLFSRVGRAASEEIILVLINAKCMPILMYALEACPLLSRDKQSFQFTITRLFMKLFRTGSPAVVEECERHFNFLPFKQQLDIRTAKFLQSFMASENSLCLLFESNARLQLSSIYSNYGHTIRTVCQLVNKIHEQYFC

SEQ ID NO: 183 - protein, 917 aa, synthetic construct
  source 1..917: note = MG140-23 retrotransposition protein
MGSSNFTGARLTVISYNLHGLNQGLTGIRELMTQINPDVIMVQEHWLTSDNLFKLSDISDNYFVFGSSAMDSRISAGPLVGRPFGGTAILIKNDFVNVTVSVATCERFTAIKLDKWLLVNVYLPCSGTDHRLLIYTDVLCEVQALISTHSDCECLVGGDFNSDLKDSKSHAINHMINDFILTNNLCRCDLVFPVAIKHTYINESLNCSSTIDYMLTSNPGCTVGFNILDLDLNLSDHLPIMAILALNAHIPSAASMDVSVDVTHLRWDHAQLHEYYDLTRLGLDPVLCELTVLINNFRCTPDTAVYGNIDALYNRVVNVLNQCADHCVPKQRKNFFKFWWSQELAELKEKAIASCRMWKDAGRPRNGPINAKYRQDKLLYKKRIRKERAEETSSFTNDLHDALLYKCGSDFWKVWNSKFENKSSKIIQVGGTADSNVITSNFAKHFEQVCQPFSSARNAEIKAQYDDIRANYNTIPVFSDIEIFDSELLGSLLAKMKNGKAAGLDGITSEHLKNCHPSVVVILCKLFNLFIATGHIPSSFAASYTVPIPKCDGRSKSLDVDDFRGISISPVISKLFELCVLERYSDYFDTSDHQFGFKKNLSCCHVIYSVRTVIENFISNGSTVNLCALDLSKAFDRMNHYALFIKLMERKFPVEVLKVLEQWFSMSITCVKWGGQMSNFFSLVAGVRQGGVLSPVLFSIFIDGIVNKAKSANVGCYLSNICVSIYLYADDILLIAPTVTGLQTLLTMCEQELFELDMKLNVAKSVCIRFGEQFDAVCSDILSVQGGKLQWVYNCRYLGVYFTSGRVFRCCFHNAKCSFFRAFNAIFSKVGRFASEHVILSLLRTKCLPILLYGIEACPMLKRDKHSLDFTLTRIFMKLFCTATPAIVAECHVQFNFLPLKYQVDIRTASFLFRFIS

SEQ ID NO: 184 - protein, 973 aa, synthetic construct
  source 1..973: note = MG140-24 retrotransposition protein
MMAALSNSTHLIGNSNCTGARLVVISYNLHGLNQGMTGIRELIRHVNPDVIMVQEHWLTSDNLFKLSDISDKYFVFGSSAMDARVSAGPLVGRPFGGTAMLIKNSFVNITVGIATCERFTAIKLANWLLVNVYLPCSGTDQRLLIYSDVLCEVQSLITAHSDCDYLVGGDFNSDLTDAKSHASNHMINDFIVTNNLCRCDVVFPVATKYTYINESLDCSSTIDYMLTSNCDSTIAFNIVDLDLNLSDHLPILVVLALNADLSNATCNANPSVDVTHLRWDHAQINEYYDLTRLGLDPVLCELTVVINNLHCAPESMVSDQIDALYERVVNVLSQCADQCVPKQIKNFFKFWWSQELAELKEKAIASCRLWKEAGRPRNGPINVKYRQDKLLYKKRIREERAEESSSFTNDLHEALLRKSGSDFWKVWNSKFENKSSKIIQVGGTADSNVIVNSFAKHFEEVCQPFTAARNADLKAQYDDVRVNYSTPPVFSDAEIFDAELVGNLLVKMKNGKAAGLDGITSEHLKHSHPSVVVILCKLFNLFIATGHIPISFAASYTVPIPKCDGRSKSLEVNDFRGISISPVISKLFELCVLERYRDYFDTSDHQFGFKKTLSCSHVIYSVRTVIENFISNGSTVNLCALDLSKAFDRMNHYALFIKLIKRKFPVEILQILEHWFCGSKTCVRWGGQVSYFFAMVAGVRQGGVLSPVLFSIFIDDIVNKVKLANVGCYLSNICVSIFLYADDILLIAPTVTGLQTLLTVCEQELLELDMKLNVDKSVCIRFGDQFDASCTDIMSVQGGRLLWVDSCRYLGVYFTSGRVFRCCFHNAKCSFFRSFNAIFSKVGRFASEQVILSLLRTKCLPILLYGLEACPVLKSDKHSLNFTLTRLFMKLFRTGSPAVVAECQLQFNFLPLQYQVDIRTAKFLFRFLNSANSLCILLSVHAKAQLTSILSSYGEDVSSIYDLHVAISDILVA

SEQ ID NO: 185 - protein, 968 aa, synthetic construct
  source 1..968: note = MG140-25 retrotransposition protein
MASEQINLRDCDSAEKLIVISYNLHGLNQGRPGITELISLLSPDAIMIQEHWLTPDNMYKLDQLSDNYLVFGSSAMNDCVLSGPLIGRPFGGTAIIIKKSLASATKNIISSDRYNVVKIANWLLFNVYMPCVGTDYREYLYVEILSEFDSLLAANPNCSCLVGGDFNTCLDNPVNVSVTINTFIANNMLHRCDILFPSNNKFTFFNESTHSGTAIDYMLASDPNDIIAFNVLDMDINLSDHHPIMAVCACPKLSIDPSSCQTNLPEIQHFRWDHAQLDNYYEHTRRLLQPVYDELNVLACCHVSLDAMIVADKIDSIYNRFVTALCVSAEKFIPKHRKNFYKFWWSQELDALKEKSIASCRKWKEAGKPRNGPIQAQYKKDKLLYKKCIKEEQAAETCSFTNDLHDALLCKSNQDFWKTWRSKFSNNSNNIIQVDGIADGAAIANNFANFFESNSKPFSDSRNAELKAQYTELRADYCGCPVTDNELFDVELIGKLITEMKNNKAAGLDELTCEHLKFSHPIAICILTQLFNLFIALSHIPSSFGASYTVPIPKCDGRTRAMSVDDFRGISISPVISKVFEMAVLDRFAPYFRTSDHQFGFKRNIGCREAIYSVRNVIETFISNGSTINVCTLDLSKAFDRMNHYALLIKLIERKLPFQLLIVLENWFLISITCVKWNGHVSHFFRLLLGVRQGGVLSPLLFAIFVDDIVIRVKSTHAGCYISLVCCCIFLYADDILLVSPTVSGLQILLNACENELTELDMKINVKKSMCIRFGKRFDVHCAELVSVQGGPILWVDSCRYLGVYFLSGRSFRCSLDDAKSRFFRAFNAIYSKVGHFASETVILNLIRTKCLPILLYATEACPLLSRQKHSLEFTVTRIFMRIFHTGSMDIVKQCQCNFGFLSVSYQLSVRTARFLQKLVASENSLCLLFSRTASDQLAKIFSFFDEDIKTACQLNNFLYELLSVSFN

SEQ ID NO: 186 - protein, 968 aa, synthetic construct
  source 1..968: note = MG140-26 retrotransposition protein
MASEQINLRDCDSAEKLIVISYNLHGLNQGRPGITELISLLSPDAIMIQEHWLTPDNMYKLDQLSDNYLVFGSSAMNDCVLSGPLIGRPFGGTAIIIKKSLASVTKNIISSDRYNVVKIANWLLFNVYMPCVGTDYREYLYVEILSEFDSLLAANPNCSCLVGGDFNTCLDNPVNVSVTINTFIANNMLHRCDILFPSSNKFTFFNESTHSGTAIDYMLASDPNDIIAFNVLDMDINLSDHHPIMAVCACTKLSIDPSSCQTNLPEIQHFRWDHAQLDNYYEHTRRLLQPVYDELNVLACCHVSLDAMIVADKIDSIYNRFVTALCVSAEKFIPKHRKNFYKFWWSQELDALKEKSIASCRKWKEAGKPRNGPIQAQYKKDKLLYKKCIKEEQAAETCSFTNDLHDALLCKSNQDFWKTWRSKFSNNSNNIIQVDGIADGAAIANNFANFFESNSKPFSDSRNAELKAQYTELRADYCGCPVTDNELFDVELIGKLITEMKNNKAAGLDELTCEHLKFSHPIAICILTQLFNLFIALSHIPSSFGASYTVPIPKCDGRTRAMSVDDFRGISISPVISKVFEMAVLDRFAPYFRTSDHQFGFKRNIGCREAIYSVRNVIETFISNGSTINVCTLDLSKAFDRMNHYALLIKLIERKLPFQLLIVLENWFLISITCVKWNGHVSHFFRLLLGVRQGGVLSPLLFAIFVDDIVIRVKSTHAGCYISLVCCCIFLYADDILLVSPTVSGLQILLNACENELTELDMKINVKKSMCIRFGKRFDVHCAELVSVQGGPILWVDSCRYLGVYFLSGRSFRCSLDDAKSRFFRAFNAIYSKVGHFASETVILNLIRTKCLPILLYATEACPLLSRQKHSLEFTVTRIFMRIFHTGSMDIVKQCQCNFGFLSVSYQLSVRTARFLQKLVASENSLCLLFSRTASDQLAKIFSFFDEDIKTACQLNNFLYELLSVSFN

SEQ ID NO: 187 - protein, 974 aa, synthetic construct
  source 1..974: note = MG140-27 retrotransposition protein
MATKYSNCASDNTCNTPVHRLVVVSYNLHGYNQGCPGILELMSKITPDVIMVQEHWLTPDNLHKLNDLSNDYFVFGSSAMSERVASGPLYGRPFGDTAIFINNKYASVTTNLVSRDRYTAIKIANFMLITVYMPSVGTAQRDFLCSELLAELDAVLSSNSNSNSNCQFLIGGDFNTNLDSNAKVSLAINEFISNNSIYRCDEIFDVADSYTFCNETAHCFSTIDYMLTSCAQDIIAFNVVDMDINLSDHNPILSVCSCCIDTRSVNKNEKSADLYAEFFRWDHAPVDKYYDQTRVLMQPVLDEISSLVINSAYMDKESIAIASDSIYDNLVDAMRSSANLFIPKHRKNFFKFWWSQELDELKEKAIVSCREWKSAGKPKSGVTFQQYLKDKALYKKSIRYEQQREKSCYTNDLHEALLHKNGQDFWKVWKSKFEIGSTNTIVDGLADSAAIANKFAQHLESNCRPFNSERSAALKIQYIDQRAQYCGTPITDCQWFDVELIDRLTREMKNGKAAGLDEIFCEHLKLSHPIVVCILSKLFNLFLSTGHIPASFGVSYTVPIPKCDGRTRALTVDDFRGISISPVISKLFEMAVLDRFSHYFVTSDYQFGFKKHLSCSNAIFCVRNVIENFVSRGTTVNVCTLDLSKAFDRMNHYALLVKLMSRKIPDLLLCIFELWFSISVTCVKWDNHFSHFFLLIVGVRQGGVLSPVLFAIFIDSIVDKVKSTNVGCYISLICCCIFLYADDIILIAPSIHALQTLLNACEDELFVLDMCVNVKKSACIRFGTRHDAQCCEIISSFGGSIKWVESCRYLGVFLVSGRNYSCSFHDAKSRFFRAFNAVFGKIGRIASEEVVLSLLKAKCLPILLFATEACPLLSRQKTSFDFTLTRIFMKLFNTGSAVIAKECQNLFNFLPIRMQLSIRTARFLQKFAACENNLCSLFADIAVKQLNVLFSEYNVKTACQLANAIYRKLSETLN

SEQ ID NO: 188 - protein, 973 aa, synthetic construct
  source 1..973: note = MG140-28 retrotransposition protein
MMAALSNSTHLIGNSNCTGARLVVISYNLHGLNQGMTGIRELIRHVNPDVIMVQEHWLTSDNLFKLSDISDKYFVFGSSAMDARVSAGPLVGRPFGGTAMLIKNSFVNITVGIATCERFTAIKLANWLLVNVYLPCSGTDQRLLIYSDVLCEVQSLISAHSDCDYLVGGDFNSDLTDAKSHASNHMINDFIVTNNLCRCDVVFPVATKYTYINESLDCSSTIDYMLTSNCDSTIAFNIVDLDLNLSDHLPILVVLALNADLSNATCNANPSVDVTHLRWDHAQINEYYDLTRLGLDPVLCEVTVVINNFHCAPESMVADQIDALYERVVNVLSQCADQCVPKQRKNFFKFWWSQELAELKEKAIASCRLWKEAGRPRNGPINVKYRQDKLLYKKRIREERAEESSSFTNDLHEALLRKSGSDFWKVWNSKFENKSSKIIQVGGTADSNVIVNNFAKHFEEVCQPFTAARNADLKAQYDDVRANYSTPPVFSDAEIFDAELVGNLLVKMKNGKAAGLDGITSEHLKHSHPSVVVILCKLFNLFIATGHIPISFAASYTVPIPKCDGRSKSLEVNDFRGISISPVISKLFELCVLERYRDYFDTSDHQFGFKKTLSCSHVIYSVRTVIENFISNGSTVNLCALDLSKAFDRMNHYALFIKLIKRKFPVEILQILEHWFCGSKTCVRWGGQVSYFFAMVAGVRQGGVLSPVLFSIFIDDIVNKVKLANVGCYLSNSCVSIFLYADDILLIAPTVTGLQTLLTVCEQELLELDMKLNVDKSVCIRFGDQFDASCTDIMSVQGGRLLWVDSCRYLGVYFTSGRVFRCCFHNAKCSFFRSFNAIFSKVGRFASEQVILSLLRTKCLPILLYGLEACPVLKSDKHSLNFTLTRLFMKLFRTGSPAVVAECQLQFNFLPLQYQVDIRTAKFLFRFLNSANSLCILLSVHAKAQLTSILSSYGEDVSSIYDLHVAISDILVA

SEQ ID NO: 189 - protein, 1057 aa, synthetic construct
  source 1..1057: note = MG140-45 retrotransposition protein
MTGEDPQECAKCNYNMIDTKQAVDHCARKHHGMSVQWKCRKCERDWSNIRSIAAHYRHCTGRPPSPVATTATSHVCDQCERAFTGLAGLQLHRKRKHPAAYNESLPRPTGKNRLLGADELTRLAGVELDLGTSKRINLVCHDHFQHRSVDAIATIRKSKRYKDILKVVVETRSLVDEQEAGEGAQAPEPFINIVEAQLRTRFDELEGDSSPAVRDTLAYTRTSLAEGNATIGLDLLSEEVYRPRKAPDSTSNPRKRGPDFAPTTRSQKRRQLYKQIQSLYQRNRKQAVGVILDGDPIQTVFPDVDRADEVFRGRFARPSPPDDKVFNLVPGDTMNMGYITSEEISKCRSAMKKKNAPGPDKEVTMDLVLGLELTVLELIFNTWFALGQVPTAFKEARTILLPKSGDATDPNNWRPITICSLIGRLYAKLLAGRLSKCANLSERQKAFVPVDGCGENTALLSSVIAHAHKVKTQVHIAFLDLAKAFDTVPHTSILRALRRKALPEHFIAIVENLYSDANTSISVGDKSTPSIPMTSGVKQGCPLSPVLFNLVLDELIQNIGTIDGLSVGHSKLAILAFADDLVLISGTKDGLASNLRTCEELFNARSMKLNARKSMTLSLVRAHKRKTMLTDETPHWKVYGEFLPAVKHTEEVKYLGVRYTAGGRPMAKLPKLNDWLQKLKSAPLKPQQRIQIVRSTITSRVIHTLRLCRVHAKLLKNLDRKIRTFIKGVLHLPSGTSTDWFYIPIRMGGLGLQEFMSLIPAAKLKLIDGMKKSQDPTVVDAIRQEHWLKEERWCRAVSSLYGNKEQADRGRVERHISSHTGQTQIGFARLPGQCNWLEGGGKMTGRDYIVGCHMMSNTLSVRTRTFHGGVNRVTTCRYCPGVPETPSHALQSCSKVRDAVTARHNSLLTKIQHFLTPNFDSVIREPWFNGVEGRMNPDLVLIQGRLLYVVDLTVPYDSTIRFMDSQAQRNVDKYQVLEPLLRTKFQVERVKVLGLAVGARGLYTQTGVDIWATLGLTERQRRCVSAMALKQSCLIWGLFTGNRQPQPTLDTGTSAAE

SEQ ID NO: 190 - protein, 1174 aa, synthetic construct
  source 1..1174: note = MG140-46 retrotransposition protein
MGSATLYWDIGIALPTKTNKKVARVSLTRNAHSESNKISDSNPSSTIYQIDYPIESESCSLCHEDLPNLNLKIREHINDAHGIVTIRYKCRNCGKEYDTISSIKSHYPACKRKQTNNNLAAAVAKPASTNPQFPVTHQNIPNIPPLQCVECHSKSSSFTAKDRKGLITHMRTKHPQAYEESKKVANIRIAWSNDEDNILANLEISLKSTQKGQILERLFNEWNKLVVQSHANYRSKDAIRARRQQQEYKAILRDLIQKQDDTNASSDDNDSSTDSDSPSIPATICNDMNAIHKLLNDIVIAGHIKLSDHMKNAIDAFLNPNKAIDPVKLTMSGINQSITDIRNKNNNNRNSSRVNGTATAINKKPARNKSRIEKSKQHAYYQRLYLKNKSRLMDEIIDGVAPNVDPPPIHTAIQYYEQIWSILVQDTHPVTTKPDFNNKDNTLLSPITKVEIQWAIKKTKRDSAKGVDQITLQEAKLLAEDDLYIAFNIWLGCKTIPSDLKLNRTTLIPKGKQGLDMITNWRPITISSILLRLFNKIIACRMNKYFEIDKRQLGFRPINGCSMNILWLHHLLKHARLNRRDLYVCLIDVAKAFDSVPHESIFRALVRHHAPSSFVELVRNQYADSYTSITYKNLSSKRIKILRGVKQGDSLSPLLFNLVTDELFGILKDQLGYNITNIGSSNIKCFADDICLISGSRIGMGHMISETVSFLNDRNLQVNANKCMSIGLQKGFKGKKSKIVTEPIFTINGSLIPILGHVENHTKYLGIQFTSVGMVNANVAKDRIIMVLNKLQKIPLKPQQKIDLIRSHVIPLFIYQLINLENYPKLLKEIDILIRRAIRSILHLNIGLSIEFFYLPIRDGGLQIPLLRDIVGLAKVRIYKYIMRSDDELLKHLVQKQAFPILHRFINELKLDSSYETSDIKLRKIQLVKDRRVSYAGKVHGYGSEVFSTCPSTNFWLYGDNKTVTGRTYINGIKLRTNTLETRVTVTRGCMVDKTCRMCKEENESLMHILQFCKTTKGLRYARHNSVCARVVKKLKERGFQVYVEQAYTTDETGLPTLLRPDIIAVKLDHAYVLDVQAVYESSGASFINAYKFKVDKYTPLIQAIKNRHKCKDVTIHGLIIGSRASFHHGHIRIWNEFGFSSSELKYMALNCLENSLRIWSTFNFNRLNSFNRS

SEQ ID NO: 191 - protein, 1162 aa, synthetic construct
  source 1..1162: note = MG140-47 retrotransposition protein
MDYNILMRYEGRECIRCECGVVCTTQATIKEHWASVHRVCGLVLVCDKCNKRFVTLLAVSCHFCKCDAVEVESVGPEECNLCGRWFTQGRSMSAHQWKAHPLQWRARKGKAERKRRLDLVEEEDENVGRPYGQERKRARVDEDENAGHPIGEHVEVAGITPGNGEAIGVEVVFPDTQERVQMGVDEDDNTRHPVSEIEEGAGINPGNGEEVDVDAIHSDSQEQMRVDEDENAGHPVSENEEVVGNAPDNGELEVAGVTPGNGDLVDVHLVSQAAGIDEAVGSGLHVGAGIAPSESVEAFRAALRSLVVEGGLSGLVRDAVVNVLNDEGGERIGSVLKDLVQAIGLENATTPGTARRPGHRGGFGRHRHVGNKAASMYAGFQAMMTRNPSEVARWLWEGRAGEEGNVVPPMDHLVRIFGSVMSVDGVEDNEQIASCQEGVKVFYPVTSQDLDKALNKANASAPGLDGLRIESLKRMSGDNKSNAVALVNLALLAFGNYERTVRTVMIPKSTEHLEDADNWRPIAIASHIIRVGHRVLAHRLESQVKLHPAQRGFTRGDGLARNVWLLDAIIKHARVNNRTLCVVSLDIKKAFPSVSHSSIARAVDRFGCSPVFCEYIRSVYRDNATVLQCGKSVSDAILVKRGVRQGDPMSSVLFNMVMDELLCLLDPALGYKFDGTCVKAMAYADDLVLVARSVGAMKKLLTGTEEFLLKRGLMLNEKKSVALHLRRGKRAVVLSLEEVWSLREGAIGMVSEIKSLTYLGVRFGPYGKMNYDTKPLSDALGRLCRAPLKPDQKLLLLKTHLLPKALHSLTLGCCDKKLLKTLDMRVQHAVRSILHIKKDVPCAFIHGPSKHGGLGVMSFVADVPRHVCNRIEGVQLAGEGGEMRALVDSFYFESILRKLRTPATQVPDEYVAHLSRKNCRRNMSVRLKQADMSSKYDTRGITEVAEHGDSRAWLASKPVFWPARTYVNAVQWRCLSITCRSRVSHGRAGDRLCRTGCGKIETAFHISQVCPSTHLARVARHDRIVQLIKRSAESKGHAVVVEPRITTAAGIRKPDLVIANARSKTVFVVDVHVAWKGLRQAFDAKVKKYGRHKEISDFGRTLLPEAERVQFGAIVVSPRVIWAGANEQVVNGLQLPHGIRKVVLASCVEGTMKILSAFNAVQ

SEQ ID NO: 192 - protein, 1056 aa, synthetic construct; identical to SEQ ID NO: 168
  source 1..1056: note = MG140-48 retrotransposition protein

SEQ ID NO: 193 - protein, 1396 aa, synthetic construct
  source 1..1396: note = MG140-49 retrotransposition protein
YFHVVRPGCRSNRSGGKAFCPSALGGVYIPSAVVFAHIIVLSMAESNYSVSLVEGATAPSSATACTSVGDDCPSSVPFPDHSCFCEVCGVAFGSDSGLSLHQRAKHGEWYHQRRLPVFVRPGWSREEIVLVARAEIRLVWAARQSGMGEGRIRVNADLCRQFVNRKMDAIKYIRQTKGYKELLRKLEITMAEEGAEERELAPDGDTHLHQVMYGNWEQSQVVKHPRFVELPSKTVKQPVSVTETSESVPVGPVGEASGVVDGSKEGEDGVASPIRPQVVQRMWVTPEEKSRKGPKVRWGHELMIEVAREEQRLAGAFKMNVELHKRFPSRTLEAIKNMRRQDKYKALVKSLPAPHLVVTPPGPSEPQEGTPPQEVVSEENVGSSPQNVCTPLNVLCLSNEGIRPQIDCTMLPDDVSLNEVTMCEESFSIGGFGVDTPPRRIDGTDEGREKKKEDENDARDVSEPEPPSQACNPPQGDVSQAVGDVGGRTVDGQVGDSDQFDQGRDGGVGVETEYSSWKESLLEELVCAQGYLAGMDSLEFMDFRPGQLSREHREMLDIEYQRWVELELGSSHRRKGPRRRARRREAAGRKEAAGPAEAGGRRKRRRTEYARVQKLYRSNRSECSRKVLSGEWRSEETPSIPLEDQVVFWSRVFGEESVPDTRTVRPQGMVLWGLVEPITVDEILSTLRNTKDGAVGLDKISRKDISKLNPRALQAHFNLWLYAGYQPIEFRRSRTVLIPKVPEPSGPGQFRPIAIGSFISRVFHRLLAERLSGLLEFQSRQRAFIKGDGIADNVFLLRCLLRDTCEEVKPLSLAFLDVSKAFDSVSHATLLLAAERMGAPGPFISYLRTLYSEASTVLHVDGRFSDPLMQNRGVRQGDPLSPLLFNCVIDWALASLDPEMGKVVGGGPRLNHLAFADDVVIIAESVVGLQHLCGQFERSLGRCGLTLNVDKSRTLRIATDGKAKRWVCDPTPFVSLAGGLMPAVSIAHAYKYLGVHISARECDSTPEEILTRGLNQLKAAPLKPQQRLYMVRTHLLPKLHHKLVLSRTRGGVLNRLDRLVRRSVRLWLNLPHDACNSYIHSEVKHGGLGIPSLRLTIPFMKSARLRRLAALRDPVFVALVASSRTFAEEVKRCADPPVRVGDTIVTSVPAAKEALAEQLHSSADGYGLRSSAGVPYVHSWVSDGTALMSGSAFIHATQIRGATVATKKRSARGRPEANTACDCCGRPETLGHVLQVCHRTWGSRIKRHDALMEKFLQALEIRGGSIVRAPVIPVVGGSPQKPDGVIYFQSHCWVVDASVVADNADLDNAHLSKCAKYDTPTVRDWCQSNWPSHMGGHGIVRFGALIFNWRGVMSRLSARMCDLLNVNRTVQKVMAVCVVEHGWSMYREFHRSTAWR

SEQ ID NO: 194 - protein, 1073 aa, synthetic construct
  source 1..1073: note = MG140-50 retrotransposition protein
YAINQALVKVTAGRTLEAIKSHRKLPAYRQMVRSYLRTTGGLIVDEAVVPARIVAEVTGGATSGPQDDNSRQGDDRSSPVATRVAEVRSPGPQPATLAVAAGPAGPTGRSNDRNMTDNQITTMADVHQLHTGRIPSGAICPPDGKHKRKVTPRPEARVETRPLSPIISRWSDEETDSDPLPDTQNINTPVREEIERASHGIAEGMAGEYDWRAPVKTELLNLATDANICPELLHEVLLSPCGDRELLQELIDVDLLGFFPPAERPRRNVRRRPEQQAPVTSRAKRRAAYSRVQALYKKSRTSCARTILAGKWREVAPSVELREQVAYWKTLFEHESQEDSREPPAEGAPEWEIVNPVTKDEVARHMRGLKDGAAGPDGKLRKHLKGLNTGALAARFNLWLLAGMAPDAFREGVTVLIPKSNDSTLPQDHRPITLGPILCRLYHRILAERVERHYRISERQKAFRRGDGLAENCYILRTVIDDRKARCQATNIAFIDVSKAFDSVSHESIFLAAASAGIPDPLVDYVRSVYGGLRTRIRANGELSEVIAVNRGVRQGDPLSPVLFNAVIDLALRHMDPEIGVKVDSERLSCLAFADDLVLLASTPQGLQKQFSGVERALCRSGLALNVGKSATLRLDVHGKRKRWACNPVGFLKCRNGGTMRAMSITDGYMYLGNTVSAGVASEKSVLILKAGIKELTQAPLKPQQRMYILRNNLIPSLMHSAVLGSISKKSLKFLDTMTRAAVRSWLRLPRDAPFGYFHADFRDGGLSVTPLLWTVPLLRTKRMTKLVASPDPVARAVSRLPIFARERNRWSRPLSAYGLPIRDAVGIKRAMAEGLHTSVDGRGLNGSFASGHVNAWMTSGTARMTGSGYVNCIRIKGNLPYTRARAARGRPEKPIRCDACNEVESLGHILQRCSRTHQPRNDRHDKINKFLNQSLKKLGFQTQVEPPIPTTQGVRYPDLVAWRDGRCVVIDTTVVADNRNPDEAHARKATYYDTAGVRKWCADKSGVPVKDISMSACALTWRGIPSQRSVRELSTLGITKSHWQVMSIQALEGSVKCYAHFFHSTSGTRAVP

SEQ ID NO: 195 - protein, 768 aa, synthetic construct
  source 1..768: note = MG140-51 retrotransposition protein
AHYRHCTGRPPSPVATTATSHVCDQCERAFTGLAGLQLHRKRKHPAAYNESLPRPTGKNRLLGADELTRLAGVELDLGTSKRINLVCHDHFQHRSVDAIATIRKSKRYKDILKVVVETRSLVDEQEAGEGAQAPEPFINIVEAQLRTRFDELEGDSSPAVRDTLAYTRTSLAEGNATIGLDLLSEEVYRPRKAPDSTSNPRKRGPDFAPTTRSQKRRQLYKQIQSLYQRNRKQAVGVILDGDPIQTVFPDVDRTDEVFRGRFARPSPPDDKVFNLVPGDTMNMGYMTSEEISKCRSAMKKKNAPGPDKEVTMDLVLGLELTVLELIFNTWFALGQVPTAFKEARTILLPKSGDATDPNNWRPITICSLIGRLYAKLLAGRLSKCANLSERQKAFVPVDGCGENTALLSSVIAHAHKVKTQVHIAFLDLAKAFDTVPHTSILRALRRKALPEHFIAIVENLYSDANTSISVGDKSTPSIPMTSGVKQGCPLSPVLFNLVLDELIQNIGTIDGLSVGHSKLAILAFADDLVLISGTKDGLASNLRTCEEFFNARSMKLNARKSMTLSLVRAHKRKTMLTDETPHWKVYGEFLPAVKHTEEVKYLGVRYTAGGRPMAKLPKLNDWLQKLKSAPLKPQQRIQIVRSTITSRVIHTLRLCRVHAKLLKNLDRKIRTFIKGVLHLPSGTSTDWFYIPIRMGGLGLQEFMSLIPAAKLKLIDGMKKSQDPTVVDAIRQEHWLKEERWCRAVSSLYGNKEQADRGRVERHISSHTG

SEQ ID NO: 196 - protein, 520 aa, synthetic construct
  source 1..520: note = MG140-52 retrotransposition protein
NATIGLDLLSEEVYRPRKAPDSTSNPRKRGPDFAPTTRSQKRRQLYKQIQSLYQRNRKQAVGVILDGDPIQTVFPDVDRTDEVFRGRFARPSPPDDKVFNLVPGDTMNMGYMTSEEISKCRSAMKKKNAPGPDKEVTMDLVLGLELTVLELIFNTWFALGQVPTAFKEARTILLPKSGDATDPNNWRPITICSLIGRLYAKLLAGRLSKCANLSERQKAFVPVDGCGENTALLSSVIAHAHKVKTQVHIAFLDLAKAFDTVPHTSILRALRRKALPEHFIAIVENLYSDANTSISVGDKSTPSIPMTSGVKQGCPLSPVLFNLVLDELIQNIGTIDGLSVGHSKLAILAFADDLVLISGTKDGLASNLRTCEELFNARSMKLNARKSMTLSLVRAHKRKTMLTDETPHWKVYGEFLPAVKHTEEVKYLGVRYTAGGRPMAKLPKLNDWLQKLKSAPLKPQQRIQIVRSTITSRVIHTLRLCRVHAKLLKNLDRKIRTFIKGVLHLPSGTSTDWFYIPIRM

SEQ ID NO: 197 - protein, 615 aa, synthetic construct
  source 1..615: note = MG140-53 retrotransposition protein
RPINGCSMNIQWLHQLLKHARLNKRDLYVCLIDVAKAFDSIPHESIFRALTRFKASSSIIELIRDQYTNSSTTIVYKDLSSKRIPILRGVKQGDALSPLLFNLVIDELFEVMKDQFGYNIANIGSTNIKCFADDMCLISSSKSGMGFLINEATTFLENRGLQINANKCMTIGLAKAYKGKKSKIITESTFNIHGTPIPMLGHVEHTAKYLGIYFTSVGSVKAIVTKSNIEIVLDKLQQIPLKPQQKIDLIRSYIIPRFIYQLINLEVYPKLLKQIDLLIRRSIRSILHLHQSLSIEFFYLPVRDGGLQIPLLRDIVGFAKVRIYKQIMNSNDAVLQYLMESQGFPIIHRFLNELQLSSSFETNDIVVRKNQLMRDKRVSFGNKVHGQGYEVFSTCPMTNFWLYGDCKTMTGRSYINGIKLRSNTIETKVTLTRGMSVDKSCRLCNNEYESVMHIMQFCKGTQGLRYKRHHYVCNRVINKLKERGFVVFSEKAFMADTTGLNTLRPDIIAVKNNHAYLLDVQCVYETSNASFINAYNYKVQKYTPLVQAVKDRHCCVEVTIHCLVIGSRGSLYHNHLSIWYSLGFTSSELKYLSLNCMENSLRIMSTFHESVKNNR

SEQ ID NO: 198 - protein, 1330 aa, synthetic construct
  source 1..1330: note = MG140-54 retrotransposition protein
MHHPVPRGGAGAHDDGVTCDRCGKVCKSRGGLKLHRRACLTGGVSGLSSAQAPAGGVVSPDRTSLGKGSSRNGSASGLSSARSSTTDVSRTVSAREGRDEGGNSIVGGLRADALECRVVVERLATTRPPATVSDSVAATIVGGNRADALECREAVDPVPASRPPDSEVASAVLQVESDGLLAAGGPPSDASSPEESRAGVRSRPGVLCGSCGRSFGDKRGLSQHERVAHPADYHSRLAIGHRTGSKRRWTYEEKVLVARAEVSLSGTESLNAKLSLAFPERTFDAIKSLRRNPAYRALVHEIRSEGAGGADGSATASAASDPSGGAGASGVTPECSAQGAPGVPASQEEAIRELADACRADSDALCLSPEELGELIALVDSSVRDPSGPSGQRVQALVDKEYDQWVKSLPIPQPKASQSVPEHSGASSCRGRRRRPRGARPTPGSPGVRTLSKRQQRRRLYGIVQELYRKNRTRCAKTVLSGDWAKEKRTTSLEEQDSYWRPLFEEPSKADSRDPRPVSRALFEISQPVTATEYGLVLKSTHESSPGLDRVDRKVLRGIGPRIGVAHMNLWLLACRPPGAFKVGVTVPLPKSADAADPAEFRPITMATMVCRLFHRLLAHRAERHLPLGARQKAFREGDGLADNVWILRSLIEDCKARHRPLCVTFVDVRKAFDTVSHESVVTAAERIGFPPGLVSYIQCLYTGGVTQLRVGRVLGSPIYPARGVRQGDPLSPLLFCAVMHWVLSQLDARLGLQLAGGVRVNHLAFADDVALMSSCPIAMKRLLCELESGMEMVGLRPNAAKSASLRISVSGKVGKWFCHPEPFLSLAGGPVPAIDIQGSYKYLGIRTGAGRKVGEAVTNKLEEGLEQLSKAPLKPEQRLFFLRVHVLPSLYHETALCKYSKGLLKNLDRKSRAAARRWLHLPHDVPQALFHASPDEGGLGLPELLVQVPLMRRARVEKLFQRATEDRDPVLAAVIGMSRELRRERQRWEGGVPCYSRKVTDRTGRGRATAAALHQSCDGCGLSDTREVPAVSRWVTSGTRVASGKSFVDAVHIRAGCLYSKVRASRGRSGAPGAVDLQCEVCPARRETLAHVVQQCPRSAHARDERHNRVAKLLIQKLTASGFQVEAEPAIKTDYGVRRPDVVAYKPGEKAVIIDVTVVADLPGELSNAHDRKSNKYDDPQIRAWVARRSGVSTTAVSLTSLTFNWRGALHGRSAQDMVSLGVSLGTLEIMSLIVLEWGHRAWRESRDATWIRMDQVPYCPASSRSRDETGPHHHTGGSRRRHLAARPPQPVCPRGTGRHGRPVQAGTPGRGRHQPGPAGARGVVPSSR

SEQ ID NO: 199 - protein, 1201 aa, synthetic construct
  source 1..1201: note = MG140-55 retrotransposition protein
MRKCGDRTKCKYCALRLGSFKSIRAHERLTHPVEYTRDINALKPPPDTEVFETLARIEAGSANGYFQKEMSAATGLTIDQVRSRRKKPEYARYLAMAKEALAAARKFKLATPKEPISIPASLPPGDSTRSKSVLPKVDAAPQIQLGPTVPPDQPVEVPVTRECLPPPDPPDSLKSGKRGRSSNSPDGSAPRKRANVDRPSVGQGAVAAAKVVPTPGTSVAPVPCQRTATPSKRKREAPSSDGSSDDDDAVAPRDRAPPRPLLSSPTAGPSWQPSQETAPVPIVYPRTETEPPASPPTPAQPVPRVSPRLERVVSPLTGGAPVASLVGILPQVFADYLRGARQRIPTGHAAVRKIADLALLGSNQELLVAIDQWLDSIISKKGAGKPTGQRGKGLGKRNYGQSRGGRGKRAANYKKAQDLFRKDRKCLAEVVLSGRDMYEPPELPSLRDVEDLYGNILESVSPEDNEVISDPKPQCNTFRPITEEDVRKAMSNWQTSAPGLDRLSIPDVKKVPPIVWSVVLSVIFGRNIHPTSWKELRTTLVPKDGDRKQATNWRPITIGSAAQRLLHRALHARLRDATRLNANQRGFCETDGTLANVLILDHYLGSRVERGSAYNVVSLDLAKAFDTVSHNSILRALKRAGIEGGTQSYVMDSLWGATTTIKVGSEATRPLAIKRGVKQGDPLSPLLFNLVVDEVLDRINAEYRGGTVGSDTNVALMGFADDLVLLSDRQIDVPLMLADINKFFCGRGMATNPKKCVSISAAPFKGDKRPIPVTRSIFSINGQKIPCIDSISSFKYLGHRFGATGVNKPNIPNLQTWLHRVEKAPLKPDQKFSILRDYLLPKLLYGLQNTRVTGAILKDVDRLVRGSVKRIMHMPIHAPDCSIHAKVRDGGLGILELRHAIPQILYGRMTKLLSNAEDPVINTVLQTERLRDIFQRLSKLAGNVPTGQLYREAIINGPQTAGLQAVAEDAASRDWLHQKPQGWTGRDFVRAVHLRTNSLPTRGHPSNPPDQRVCRHKGCTSDETVSHILQRCGAVHDVRIKRHNEIVGKIAAHARKSWQVEEEPHVRHTDGQLFKPDIVIHADHNKTVVCDIQVSWEGNDGLVPAWERKRLVYENQKFLEAATRRWPGKTFHFCPIIIGARGVWPRCNEPAQVGLGLTKQLKSSCVQSALKWGSTLHATFMRRVWANDNAQRRPPIAERAA

SEQ ID NO: 200 - protein, 989 aa, synthetic construct
  source 1..989: note = MG140-56 retrotransposition protein
MAEQEALLRLSGVQPRDINKRLTEKFPNRSYWAMKGQRKKDSYQKLVSELVLMAPVPESEIPTQTPTGPQVEDPVPMDRSLWKVEVLACIKDLIEKRGSPEEEPLWDSLTSAFVSLSGGTVDLSDVKVCLDLHAKRLTDLLGPKRKRRRPPRKVPRKRTRRFAKTGDEANNSSAADGAAATAAPSKRTRSQRKPNPARIARSQAYGRVQAAFRKNRKRCADMILEGKWEEEATTLRLEEQEAFWRPLFEEPSMPDDRPVLKIPENWQIVDPISIGEVVKALADSEESAPGSDEITLVSLRSVSPSMLAASYNLWLLAGFCPDRFVIGETILIPKDGDLKNPANYRPITVASRVTRVFHKIIAARLTNSVPLDPRQKAFRPVDGCADNVYLLDSLLKDAQRRRRPLNLAFLDVAKAFDSVSHYTLARCLRRQGVPEPLVEYVCGTLANSSTVLKVQGRKSTPIVCGRGVRQGDPLSAILFNLVIDEVIAGLSKSIGFELSENLVVRCLAFADDLVLVATSADGLRDQMFHVIEGLRNGGMLINPDKCASLRIDVDGRAKRWVVNPSPFLVLQDKQIKALDIVGTYKYLGLQAGAKGLRKAYGSFLQEKLDWLSRAPLKPQQRMYILRCHLLPRMYHGLVLGETNSTALDQYDRMVRRTIRKWLRLPHDTVAAYYHAKVVDGGLEIPRLRYSIPVMKNRRMAKLESSLDPVMQWVANSPCFLGAKVRSSKAAKVVGQTLDTGRDVQRLLANQLHTTADGRGLRHQRQSPHVNNWVRDGSDLLSGGDYLEAVLVRGNLFQTPERATRGRRTVPPMCDAGCNSTCTLAHMSQSCMRTHRLRCERHNSVLEFIVNRAIAMRHDVVREPVIPTRAGRRKPDLVALVDGSVLVVDVTIVSDQWNLNTPFTEKVDYYNTDDIKAWLAASYPGKTCEFGAVVFNWRGALNLKSSALLRRLGVSARDETLLSCRVLTFTANMFKAFTRSTVRKECRSSR

SEQ ID NO: 201 - protein, 997 aa, synthetic construct
  source 1..997: note = MG140-57 retrotransposition protein
MSFVCPDCSRAFGSQRGLTLHRRRAHEEAFHAENLPKQRVKARWDPEELCMLANLEISLDERPPGDRRGINQILIGHHPGRTLESIKCARKSQRYRDLIQELRNQRSAAPAAANTPDPEERPATEASAEVVDPTWAEDLLELLRGTPCDPISLGLPDLVPGNPSQRVRERIDSEYLEWQPPRPTRSQNPPPHPRRDLPTRPRARRRAMYAGVQSDYKRNRGRTAKRILSGEWDSEAPQTPLEELDSFWREIFTTPSMEDSRSPTSAGPTQWGMVAPVTRDELLAALKGMKDGAPGPDGRKLQDLKGIPLTELQCHFNLWLLAGYQPAALRQGVTVFIPKVEGTRDPAQHRPITMSDMVARCFHRILAKRMETFLPFNIRQKAFRAGDGTAESVWFLQQLIQKHKDQLSPLNVAFVDVKKAFDSVSHQSIILAAKRLGAPPPLLSYLTELYSDAWTSIRAGGERSEAIRSGRGVRQGDPMSPHLFNAVIDWVIQDLDPSIGALIGDGRTNVCAFADDLVLIASTPLGLQTLLDSLDRALGLVGLEISAGVNGNSASLRIAIDVKAKRWVVNPHPFLRVTRLPEDAGLIPATSITQAQKYLGVEISAGAIRAKAANKLQRGLSHLSAAPLKPQQRLYILKHHLLPALYHELVLTPCPDKYMNWLDRSIRAALRSWLKMPKDTPTAYFHAEVVDGGLGVEMLSQTVPLMRSKRLSRLGLSDDPVILAMLEYVAARPGMQRHLQAKTYGDSIINTRETLHAALAGQLHRSVDGRGLTPSAVVPDQHGWIQDPPNTTTGRSFVEAVLLRGSLLHTALRASRGHPDASTACDACGRPESLGHILQVCPRSHAARIERHNKVVQLIVRNAKRKGWNCLVEPTIPTRAGVRRPDIVLYKDTGPACVIDAQVVADNADLSVAHHRKCDYYHQPEITDWIHHQTGAGQVIYSSATLSWRGLLSGESAHCLHKTVGLSRNTLALISQATLEMGHRVYRQFKRSTLRTR

SEQ ID NO: 202 - protein, 1204 aa, synthetic construct
  source 1..1204: note = MG140-58 retrotransposition protein
MNQNKAAGEIPGHPSGDSNRCPLEQMQWQANRVAGETTLRILHAGGSSGERKDWKCPICERIESSNKLLLRHLSCVHREGGPYTYCCNLCHHYESTNIFSVSAHKRYCKLQSARGMGGSAVAASAGPSAAADAAEQQVEKPFPCNDCSGSFGTQMGLSQHRRIKHPKEYDHERTLRSVGGSVKWTDTELRAMAAEEIRLKAQGERSINQKLCCSSGRTVEAVRLRRQKKDYRNLVTELVGGKVEALVEEQVDNDTHVVDHGVGVREPPPEVPDFREDLLRRIQTDLAKLESTTGLDLALSEFAKACGLYERVRATAAEMDEAWVNWLMATAGCLGVSMTPPTEERDGNGRKRRQNLRRRQKRQDKEKKTRAKEKAKVYAATQNAVRRDPGETYRKIMDGTFSAIVDRSMPSIESVESTYSERFGVPRLDSEEVTPLRDVTEDSCLLGPITCEETRRALASSKPRTGTGPCKWLTLEIAKAIGPQRLAIVYSIWWLFGRIPDTERSCRTVLIYKDKGSREDVDNYRPLTIGNMLVRVYARIWSGRLTEVTSIHRRQKAFVKADGCFENITLLTEAIKHSKRKARPCHIVFLDLAKAFDTVPHPSLIRALTRQGVHPAVRELVADMYTRATTSINMGEKGKCRIDLRSGVKQGCPLSPLLFNLMLDELVTGIDDRDVGIELGCGTKVSIMAFADDLVLLADNATDMESMLNQSAEFFSRRSMKVNVGKCQSLRLERHRVRKGLCLVEEVHRYWKGMAIPSMGLGGVSKYLGVKVTPEGAVNVSQDEVDLWGTRIDKASLKPQQKVDALKCHLVPRLMHQVRLAELGRVKLQQMDRLLRRYFKKYLHMPRWTHTSWIHHRKGGGLPSLVEAAPRARLKASWRVLEGTDEILKPIVRGVAERARSDLLASNLVDEIDLESAAQLKKACEETRRRELSKTVNGGALTTMLNSSASRSWSSGKIYDGRTTVVTGKILSGTLPTRLNQHRGSREVERARLIACRRCGKTAETDIHVLSECEGSHGMICRRHDSVAHKLGKDLRAVGYEVQLERSVKIDQRVLRPDIIAIKAVPMVSPPEGPARTKAFLIDVTVPYERSLELLGERELAKEDKYGVLSASHVGAAIGRTIDEVEAVGIAVGCAGTVAPGTKTKLRNLGLPSTTARSLSITALAKSGQTWMAFERGKTTGSGSAIANSGSLYGSLTAPPSNSP

SEQ ID NO: 203 - protein, 1159 aa, synthetic construct
  source 1..1159: note = MG140-59 retrotransposition protein
MLPRSTGASAPPRTLTDRGGPSGGNPTLSLVYPLTDLTCPLCGCVPKGQKVLVSHLGSAHQVTNLTWECGRCHKGWESNRAVAAHYSRCRGRPDAEPARLDTGTTEPDEQVGVDGPSGGGGGEPPPVADASAGGRPHLEVSPGPTRPARHSGPGSPREPDSRGVLCDECGRSFGTLAGKQLHRKRKHVAEYNASLPEQSTRNVFPEEVLRDLAAAALDYPGRGVTGLGVGQFIAERFPRYRVADINALRKRPKYRQIENQLRADRLAAACMPGGEAGGVDNRDARPARAPTVLVRPMGPAESALEDQAWDFYQAVVDGGDIDTLYRGLFDLANGQRPSRGRSQNRHDNGERPPAATNRTQRKRERYRLHQRLFAKRPSDLMNELRKPGTAGQEVLPDTAQVQQVYSERFGSASPRDEAPYRVKPGAAEGPLSPFTIDEVRGVLRSMQLSSAAGPDGVTVKDLVTWGVRVIHPIVNAFLHRGKIPADLRSNRTSLIPKKPDPRDVNDFRPITIGPILNRFYAKLLAERLRSTVTLDPRQKAFVPVDGCSEHLFVVGEVLDLCRKRRKECNMVFLDLAKAFDMVSHHSLLRALARHGVGARFVDIVRDLYTGVSTTIRGRQGPTTPIQMARGVKQGCPMSPILFNLMMDELLESVGDRHELRPARNLPGINALAFADDLVLASGTAHGTEWLLEKARLFFGARSMAVNAEKSHVIRMTLPPRSEAVKVAEGSTFKFGEKPLQNRKVTEVVKYLGLQLSPLGTPKFKETQFLIDLGVVRGSALKPAQKMTLLRRNVLPSYMHSLRLSKVSDQLVRRLDGELRRAAKRILHLPPGTPSDFFYLSPKDGGLGLPNIREAVGLSRLKRITSLRASEDAVVRSYAETSHPLEHECRFWVRALGITDTSFRGLRHAKAALPGQRAARYRETPLGAMFAADKSRAGHPWIKEPRLLSGGDYVLAAHMLSETLPTRVCLARGQTIATKTCRRCRETDETMAHVLNGCSGTRRAQISRHNWVCDTLRQALMKSGSETETVSVLPELRVRVGGEEYRPDLTVIRGPIATVVDVAVAYDSRAENICRRYHDKLRKYDIIRGPLSDQLNERPGATPITEVRVEALVVGSRGLLMPETCQRPLSRLGLSKSLAYTLQEGTVRGSAGVWRCFRAR

SEQ ID NO: 204 - protein, 1339 aa, synthetic construct
  source 1..1339: note = MG140-60 retrotransposition protein
MISSTDSHRSVPPQPTEERLRTARGATSGSRTLCSQSGSPAGNYAGSDENFIRDTSASARGTSSLRNQMPVCLLCGIQCKNVAGLKRHAARHARHPNITPLNHLYGAFGFSCQECGADFSSQRGLSQHCRRKHPNSYNQTRLASMPTSKYYWSRDEDHRLLAAASSICQSSANLSELHSRLREHFPSRSKEAIKKRLQKLHWRQQTILDNATPGAVGSPDDLGSGGRSPISPSPLIQETAHSPLINADTEVLDHPDNQHAVSSIPIQQGGSRSMEHLGSGIRSPGSLPVLSSRSQNTPNADHDSFCPRLSDPPGVVSLSIHNQGITQPTPSNRLSALSGVVSPAPICISESPPQYQTTEPTMSTPSSSMTLHAGVATIASDDQSGAATMLQTDISLPAQGDTNEQSGGYINMESPVFPTAMAELLQTPSHLSPSDPVCFQNIPLSFLPLAQPPSIWDDSGAHFSMETPPISCPEVAISPLSPSLNLLLSAREQLTLAPENDKFRELLPEVSKTILESDDLRSLQNSLEDFAQHHFPATWKRRIHRTQSRSSIMNNKTFRRLQYSHVQRLYRNRRSDAAKTILDGRWRNAFLENNDIFPNFTSYWKETLSGDSPTDDRPPRMVLPEITRLIDPITPEEVSSAITGLMGSASGMDHITPIQLRQMPSTSLAAFFNLMLASGYIPRSLNTARLTFVPKTSNPLSPSDFRPISVTSTLTRCFHKILFNRWSPNFPSDRGQFGFLQQDGCFEITSILHAILRNTHAHSKDICIAFADISKAFDRVSHSSILRNASSFGAPTLLIHYLTHFYTSGTTYLDGEPISCRRGVRQGDPLSPLLFIMALDEALQNSTDFLFHTPAGPLPHLAYADDCILLSHSPESLTRRLYQFNKELHSLGLSLNILKTSTLHICANGRAKSVALDTSPIFINSEPLPVISPDSTINILGIPFSWSGKSPTDVSLRCSDMLNELRQAPLKPQQRIDILQHFLMPRLIHCLSLGAVHKNTLRKLDVKIRQNIKAWLRLPKDTATAFFYASVEDNGLGIPNLSTRVPLNRRRRLERHLSSPNPTLAWALRDPTSAPSHYLATSTISVAGNPISDLKFATTAWANALYSSVDSAPLRHVSTTPTSHDWLRNPQRIFPRLYIRAIQLRAGVLSTKSRRARGHRIPAEDIKCRACATPETLSHILQTCPLTHDARCRRHNEIVHMTIRKSSKRHITTMLEPHIPTARSFLKPDLLVVSNTNVFVADVAVCDPPRMERTYQEKSAKYGAISNQTLHAVNRFHPGVRTIIQCPLIFSNRGHIHPTSQKHLLRLGFTRLDISDLCVATIQGSLKTFDTYMRGSGTA

SEQ ID NO: 205 - protein, 1066 aa, synthetic construct
  source 1..1066: note = MG140-61 retrotransposition protein
MCRARPSCHLTECSEALPGEAKARLGPAGLTTLSGFCYHVATTNTQNEEAAPVAPESNNRSEGGASDDVSLARCPDCLRQFATKRGLSIHRRSAHPEEYHLENVPKERKKARWDHEEMVLLARREIDLQAAGGRPNVNQVLADVFPSRTLEAIKGVRKRPAYKELLRNLTSSIGTQDGASSLPSEGPSLGSETQQASSEEWTHDWVSDLKKAVVESGIKLDGFRLDDIEPGVPSDWVRDAVDSNYEAWLPSPTEAGRNQRARAPEKEPEGARTKRRAQYAQVQRCYDRDRTRCAQQIIAGNWREPPASLPMSVQEPFWRDLFETPSVPNSQSLPIVGEMHWELTHPITAEDVVRALKKMKDGVPLPDGRKLQDVKAIAADELAGHFNLWLLTGCLPERLRRGQTVLLPKCAEAGDPAKYRPITMSDIVVRCFHRILAQRMEIHLPFSTRQEAFRSGDGVANSVWFIQAVIKHHQDSLRPLNVAFVDVKKAFDSVSHQSILVAAARLGVPPPFLGYIRELYSNAVTTLRIGPDVSGPIRLGKGVRQGDPLSVHLFNAVIDMCLAGLDHSLGIEVSDLRVNHGAFADDIALFAATPRGLQALASELEFQLSMCGLSISSGPHGKSVSMRLDIDGKAKKWVINPLPFLRIANETVPSVSLSQVYRYLGVDVSPRRTKANVAQMLRDGLASISSAPLKPQQRLYIATYHLLPKCHHQLALSPSLAKYLRWLDRTVCSALRSWLKLPKDTPVPFFHAPVVEGGLGVPLHEHVVPLMRAKRLSRLDETPDPVIAAMLKVVSARAGSATMTRQTTLNGRVMTSSCDLKTTLATMLHHTVDGRGLVHSSRVPECHQWVNPVMSSGNQNTAGPYIAAIRVRGNLIGTALRTSRGRPQALSACDCCGRTGSLAHILQVCPRTHASRIARHDKIVDLVESALTRKGYTTCREPAIPTPAEIRKPDLVVARGSAVTVLDATVVADNADLAQSHSRKCEYYDAPAVREWIRDRYGSGEVTFSAVALNWRGSMAIPSACGSLGVSGAFLGLISFVTLERRSWIANHFRRSAYRVRHNDGV

SEQ ID NO: 206 - protein, 1217 aa, synthetic construct
  source 1..1217: note = MG140-62 retrotransposition protein
MASSLERTSSSGSVPIQRNEENIQVLLPDATAPAWEEVLTGVKQGTIPTVLIELGLIFINGARVLPRDIPAWLGHEATDIPSEAENEDKTVEEAKSWTEIVLEDDGTVAITVPFNTSVCCKEVFISHPALDKHMSVAHNDTFRRYKCALCTKTFARYKQAAVHHGFCKKKNSREKVVARAEDAQKGTIDNPIEILNPFEDLATEETEEADLVQEQTKVAKKTGLSQHERYRHPNLRNAKRVAGKQNDIERKRLAREKTREQAEETEGTLKPKRTRWSEAETKMLIQLEVELQGSKQINIAIAGILESKTAKQISYKRSMLSKAKQPKGQTPPLDAEPVPIPEPLSVPLVEMLKEAICVDGGENVDMSAELLTRAIEGESVDELQDKLLDIIKTACSKPTKKQNGPVDIPHNPRSDREKKREEYRRIQRLYYKKRKELATEILDCKPAAAKCDLDPKTVHATYQARFGGESQEVNLSRYPKAKPADNELLMKPITQDEIQKAYSRAKKDSAAGPDGIGLRKLKELDPKFAMTCNIYNVWLHTRKVPNQIKDNRSILLPKGTKDLEDVNNWRPLTISSVMLRLYTNILAKRVTKGVPLNPRQRGFIEAPGCSENGFLLQRIQKHAKRNRKRLSVVFLDLAKAFDTVSHKHISEGLKRFRVNSHFIDAVVDLYTDASTHFTLAKGETPKIPMTRGVKQGDPLSPLLFNVAMDPLLEAISAQNNGYKWDESGLQLEALCYADDNGLLTEDPKEMQSNLDVVNEFCEATGMRLNVKKSAGYDIQPSANRSYIINDFQPKWEVDGQKLPLIAPADGTKYLGVKVNSWTGVTAENTGEKLELWCSRIDKAPLKPRQKLVMLNQYAIGRIQFYMSQVETPQCKLLEMDLTVRRYAKKWLKLPDCATNHILYAETKKGGLSLPRLSLSVPCSRINVKRAILNSSDESIRSFAIATDLPEEISREAEHFKIKIPQSAKRGAKWRQLKTNRWRTLPVAGKGQRAFSFKWSNSWLKTNHNYFEEGDFITGLKLRTDTYPTRVTLARAGNTGETTCRRCKSAPETIGHISGQCPAMKGYRIARHDGICEIVSDRLKSKGWTVAREPKLVDDDGNTLVPDIVAIRENRAVIIDPTIVYENSPNSLPQANKVKIQKYLPLNEVIKDEFGVDEVEVHGLAIGARGGWCTQNTKCLTSCDLHDIGLYALLCRYALRGTINMLRMFTDLRGQRRT

SEQ ID NO: 207 - protein, 1086 aa, synthetic construct
  source 1..1086: note = MG140-63 retrotransposition protein
MLHIRVRTFPRYKQAAVHHGFCKKKNSREKVVARAEDAQKGTIDNPIEILNPFEDLATEETEEADLVQEQTKVATPTFQCEECDKTFSKKTGLSQHERYRHPNLRNAKRVAGKQNDIERKRLAREKTREQAEETEGTLKPKRTRWSEAETKMLIQLEVELQGSKQINIAIAGILESKTAKQISYKRSMLSKAKQPKGQTPPLDAEPVPIPEPLSVPLVEMLKEAICVDGGENVDMSAELLTRAIEGESVDELQDKLLDIIKTACSKPTKKQNGPVDIPHNPRSDREKKREEYRRIQRLYYKKRKELATEILDCKPAAAKCDLDPKTVHATYQARFGGESQEVNLSRYPKAKPADNELLMKPITQDEIQKAYSRAKKDSAAGPDGIGLRKLKELDPKFAMTCNIYNVWLHTRKVPNQIKDNRSILLPKGTKDLEDVNNWRPLTISSVMLRLYTNTLAKRVTKGVPLNPRQRGFIEAPGCSENGFLLQRIQKHAKRNRKRLSVVFLDLAKAFDTVSHKHISEGLKRFRVNSHFIDAVVDLYTDASTHFTLAKGETPKIPMTRGVKQGDPLSPLLFNVAMDPLLEAISAQNNGYKWDESGLQLEALCYADDNGLLTEDPKEMQSNLDVVNEFCEATGMRLNVKKSAGYDIQPSANRSYIINDFQPKWEVDGQKLPLIAPADGTKYLGVKVNSWTGVTAENTGEKLELWCSRIDKAPLKPRQKLVMLNQYAIGRIQFYMSQVETPQCKLLEMDLTVRRYAKKWLKLPDCATDHILYAETKKGGLSLPRLSLSVPCSRINVKRAILNSSDESIRSFAIATDLPEEISREAEHFKIKIPQSAKRGAKWRQLKTNRWRTLPVAGKGHRAFSFKWSNSWLKTNHNYFEEGDFITGLKLRTDTYPTRVTLARAGNTGETTCRRCKSAPETIGHISGQCPAMKGYRIARHDGICEIVSDRLKSKGWTVAREPKLVDDDGNTLVPDIVAIRENRAVIIDPTIVYENSPNSLPQANKVKIQKYLPINEVIKDEFGVDEVEVHGLAIGARGGWCTQNTKCLTSCDLHDIGLYALLCRYALRGTINMLRMFTDLRGQRRT

SEQ ID NO: 208 - protein, 1252 aa, synthetic construct
  source 1..1252: note = MG140-64 retrotransposition protein
MNRVTSQVAISIANMASFPLGTSFPLGTSSTGLVPIRCNEGNNKVLLPAANTPAQEDVCEGEQIRIRPTILIEKGGLMFINGARTLAENIPIWLGHDATDCEMDDTRTWTELVIESDSTVAITVPYTTSTCCKEVFISHSELDKHLSVAHSDAFRRYVCALCMRSRARYRQIAVHYAFCLRSNRKEAVASTPSTLDGPEASLCDTNPYISLAAESSPEDTEEGDLSQRAIPVTKPTFECKECDRSFPTKIGLSQHERYKHPNLRNANRIADQEKDIERKRKARSDSKKLTEETGTTSKPKKSLWTEVEIELLVQLEVELSGARFINMAIAERMPGKTNKQISDKRKSLKSQVTSKARTKKVQNPTPTLVQDTTVVQSEPTIPREDMFNNAICNSGLECVGMSAELLTQAIEGKDIDGLQDKLITIIKSACSKPIKAKPNGPANSTENPSGKKKNKQEEYRRVQNLYSRRRKQLATEILDCKVGSTKCDIDPQIVQETYEGRFGGESQEVNLSKYPNAKPADNNVLIEPITQQEIQKAYSRAKKDSASGPDGIGLKKLKELDPQFAMTSNLYNVWLYTGKVPMEIKENRSILLPKGTTGLENVDNWRPLTISSVMLRLYTNILAKRVIKGVPLNPRQRGFIEAPGCSENGFLLQRIQKHAKRNRKRLSVVFLDLAKAFDTVSHKHIQQGLKRFCVNDHFIETVVDLYTDASTHFTLAKGETSKIPMTRGVKQGDPLSPLLFNIAMDPLLEAISAQNNGYKWDESGLQLEALCYADDNGLLTEDPKDMQENLEVVNEFCRATGMKLNVKKSAGYDIKPSANRSYVINDFHPKWVVDGQKLPLIAPADSTKYLGVKVNSWNGVTKEDLGEKLELWCSRINKASLKPRQKLVMLNQYAIGRLQFYLSQVETSQGKLLEMDLTVRRYAKQWLKLPECATDHILYAGTDKGGLSLPRLSLSVPCSRINVKRAVLNSSDESIRAFAVETGLPEEIDTDADHFRIKVPANPKRGAKWRQLEANRWRKLKVAGKGHRAFGHKCSNSWMRNENNYFNEGDFITGLKLRTDTYPTKVTLARAGNTGGDVACRRCKAAPETVGHISGQCPAVKGYRINRHNGICGILSDRLKEKGWTVALEPRIKAADGKTLIPDIIAVKDRQAVVIDPTIIYENSDHSLQSANKAKIQKYSPLTNEIKTLYGADKVEFHGLAIGARGGWCSQNTKCLTSVGLHDTGFHAMLCRYALRGTINLLRTFTDLHGPK

SEQ ID NO: 209 - protein, 1252 aa, synthetic construct
  source 1..1252: note = MG140-65 retrotransposition protein
MNRVTSQVAISIANMASFPLGTSFPLGTSSTGLVPIRCNEGNNKVLLPAANTPAQEDVCEGEQIRIRPTILIEKGGLMFINGARTLAENIPIWLGHDATDCEMDDTRTWTELVIESDSTVAITVPYTTSTCCKEVFISHSELDKHLSVAHSDAFRRYVCALCMRSRARYRQIAVHYAFCLRSNRKEAVASTPSTLDGPEASLCDTNPYISLAAESSPEDTEEGDLSQRAIPVTKPTFECKECDRSFPTKIGLSQHERYKHPNLRNANRIADQEKDIERKRKARSDSKKLTEETGTTSKPKKSLWTEVEIELLVQLEVELSGARFINMAIAERMPGKTNKQISDKRKSLKSQVTSKARTKKVQNPTPTLVQDTTVVQSEPTIPREDMFNNAICNSGLECVGMSAELLTQAIEGKDIDGLQDKLITIIKSACSKPIKAKPNGPANSTENPSGKKKNKQEEYRRVQNLYSRRRKQLATEILDCKVGSTKCDIDPQIVQETYEGRFGGESQEVNLSKYPNAKPADNNVLIEPITQQEIQKAYSRAKKDSASGPDGIGLKKLKELDPQFAMTSNLYNVWLYTGKVPMEIKENRSILLPKGTTGLENVDNWRPLTISSVMLRLYTNILAKRVIKGVPLNPRQRGFIEAPGCSENGFLLQRIQKHAKRNRKRLSVVFLDLAKAFDTVSHKHIQQGLKRFCVNDHFIEAVVDLYTDASTHFTLAKGETSKIPMTRGVKQGDPLSPLLFNIAMDPLLEAISAQNNGYKWDESGLQLEALCYADDNGLLTEDPKDMQENLEVVNEFCRATGMKLNVKKSAGYDIKPSANRSYVINDFHPKWVVDGQKLPLIAPADSTKYLGVKVNSWNGVTKEDLGEKLELWCSRINKASLKPRQKLVMLNQYAIGRLQFYLSQVETSQGKLLEMDLTVRRYAKQWLKLPECATDHILYAGTDKGGLSLPRLSLSVPCSRINVKRAVLNSSDESIRAFAVETGLPEEIDTDADHFRIKVPANPKRGAKWRQLEANRWRKLKVAGKGHRAFGHKCSNSWMRNENNYFNEGDFITGLKLRTDTYPTKVTLARAGNTGGDVACRRCKAAPETVGHISGQCPAVKGYRINRHNGICGILSDRLKEKGWTVALEPRIKAADGKTLIPDIIAVKDRQAVVIDPTIIYENSDHSLQSANKAKIQKYSPLTNEIKTLYGADKVEFHGLAIGARGGWCSQNTKCLTSVGLHDTGFHAMLCRYALRGTINLLRTFTDLHGPK

SEQ ID NO: 210 - protein, 1252 aa, synthetic construct
  source 1..1252: note = MG140-66 retrotransposition protein
MNRVTSQVAISIANMASLPLGTSFPLGTSSTGLVPIRCNEGNNKVLLPAANTPAQEDVCEGEQIRIRPTILIEKRGLMFINGARTLAENIPIWLGHDATDCEMDDTRTWTELVIESDSTVAITVPYTTSTCCKEVFISHSELDKHLSVAHSDAFRRYVCALCMRSRARYRQIAVHYAFCLRSNRKEAVASTPSTLDGPEASLCDTNPYISLSAESSPEDTEEGDLSQRAIPVTKPTFECKECDRSFPTKIGLSQHERYKHPNLRNANRIADQEKDIERKRKARSDSKKLTEETGTTSKPKKSLWTEVEIELLVQLEVELSGARFINMAIAERMPGKTNKQISDKRKSLKSQVTSKARTKKVQNPTPTLVQDTTVVQSEPTIPREDMFNNAICNSGLECVGMSAELLTQAIEGKDIDGLQDKLITIIKSACSKPIKAKPNGPANSTENPSGKKKNKQEEYRRVQNLYSRRRKQLATEILDCKVGSTKCDIDPQIVQETYEGRFGGESQEVNLSKYPNAKPADNNVLIEPITQQEIQKAYSRAKKDSASGPDGIGLKKLKELDPQFAMTSNLYNVWLYTGKVPMEIKENRSILLPKGTTGLENVDNWRPLTISSVMLRLYTNILAKRVIKGVPLNPRQRGFIEAPGCSENGFLLQRIQKHAKRNRKRLSVVFLDLAKAFDTVSHKHIQQGLKRFCVNDHFIETVVDLYTDASTHFTLAKGETSKIPMTRGVKQRDPLSPLLFNIAMDPLLEAISAQNNGYKWDESGLQLEALCYADDNGLLTEDPKDMQENLEVVNEFCRATGMKLNVKKSAGYDIKPSANRSYVINDFHPKWVVDGQKLPLIAPADSTKYLGVKVNSWNGVTKEDLGEKLELWCSRINKASLKPRQKLVMLNQYAIGRLQFYLSQVETSQGKLLEMDLTVRRYAKQWLKLPECATDHILYAGTDKGGLSLPRLSLSVPCSRINVKRAVLNSSDESIRAFAVETGLPEEIDTDADHFRIKVPANPKRGAKWRQLEANRWRKLKVAGKGHRAFGHKCSNSWMRNENNYFNEGDFITGLKLRTDTYPTKVTLARAGNTGGDVACRRCKAAPETVGHISGQCPAVKGYRINRHNGICGILSDRLKEKGWTVALEPRIKAADGKTLIPDIIAVKDRQAVVIDPTIIYENSDHSLQSANKAKIQKYSPLTNEIKTLYGADKVEFHGLAIGARGGWCSQNTKCLTSVGLHDTGFHAMLCRYALRGTINLLRTFTDLHGPK

SEQ ID NO: 211 - protein, 998 aa, synthetic construct
  source 1..998: note = MG140-67 retrotransposition protein
MAHLAIGIWTNCGPTVRSKQPRKNRRDRVPDGPDQDGPLPGEGELENDQARTVEEIRNPNLTPDHDTEGADENVNIGEGSSNDNTRSATCPICGKSFSGFPGRRLHERKAHATEFHAQESEILHKKINKRWTDTEMYLLAQRDASLQHAGMSNIDRIVELSNEFERSIDTLRKRRTLPEYKVLLDAALEKLTERVELHITPPVQIEPPMEGSNVNKPVQKRVATLWTIEEEMMLANKEAILTIDGKIGSEITEILSNGSSRSKESIRKRRSTQGFKQLVKAKIQELTQPIHLEVITEGPELRQELTQVIHLEVIHEEPELEVQDTPTPPPRLEEEDEAELNRQDMFKHWFTVAGESQMRNLWDPTQRMGINEAHEEIDKYTEEFMQAERLIKAERPTNVDRRKSTPPQGGRKSRRNNLMQLTQKKFEKDPSGCIRAILNDTLVNEGGVDQVLLREYWTEVFNKTPACEVFESKMKHPVLYKLSEPITKNEVEIGLKSLKTKSAAGVDGITCADLKKAKVGKIVTLFRVFQVSSYTPARLCLGSVSMVPKIPEPTLPQHYRPITVASMILRLYHGIIARRFDMLPISPRQKAYKKLDGIEENIWIVSKLLELAKKNKKGIALIFLDISKAFDSVGHPIIQQAAERLGVPKDIRNYLDVLYSTSELVFKGCSQKFKQNKGVRQGDQLSGPLFNGTADLGNEDLDLNVQFMIDEDVGIAEGLFADDEFLAAEGSLALQYQVDRVIPRYKKCGLQMNTSKCKTIFIEYNAQTKKYMVNPNPIIKINGEEVPAVSLEEAYKYLGVKLGAGTPKHKDILETLKIKLTRIDKSCLRPQQRLMALRRHIVPSLYHVMIFSKATKASLLTLDRSIRHFVKKWCHTPKDTLNSMIHSDIKDGGLGIPSLSLRIPRMAMQRHIRLSASIDPVIQAILKSEAGQASVARIHKTRRVNGIDVETKQAEREVWMEEMYSRVDGKGMKQHRDSETINEWVSDCSYKISGADFI

SEQ ID NO: 212 - protein, 1172 aa, synthetic construct
  source 1..1172: note = MG140-68 retrotransposition protein
MPEVPENDIARTEGEIRNPNHASDYDVEGANVNGNIGEGNSIDNTRSVTCPVCGRSFASYSGRRVHEKHAHPTDYANEELVLHKNKSKRLWTENELYLLAQRDAALENMGMMNGDRIVILVNEFERSADSLKKRRNLPEYKALVKAALEKLRNLPVQEEVRVESHTTPIVPTVLNVSTDTVNTVVHNPVQKRVALLWTIEEETLLAHKEAALIMEGVEGTEITKILSEGSTRSHESIRKRRCLAAYKALVQAKLRELTQEPPSELEIDSEISSESQGVIIEETQETHLVESQETQTPRVELSDDDQAELNRQEMFKHWFTVAGQTQLKNLWDPTKRMGISEEPIEIDKFTEEFIQSNGLLKTEKPKDVERKKSAPPQGGRNARRSALRSLTQRKFEKDPSGCIRAILNNTLVTEGGVDIKVLKEYWIDVFNKKPDCEIFESKMKHPTLYRLSEPITSKEVEEGLKALKTKSAAGVDGVTCADLRKVKVSMIVLLFRIYQACSYTPAFIRLGSVTMVPKIPEPTLPQHYRPITVASMILRLFHGIIARRFDMLPISPRQKAYKKLDGIAENIWIVSELIELAKKNKKGIALIFLDVSKAFDSVGHPIIQQAAERLGVPKDIRKYLDVLYSSSELVFKGCSQRFKQNGGVRQGDQLSGPLFNGTADLGNEDLDPNLMYMICEEVGIAEGLFADDEFLAAERSMALQYQVDRLIPRYKKCGLQMNADKCKSLVIVYNAQRKKYLVDPTPVITINGALVPSISLDETYKYLGVKLGAGTPCHKNILESLRVKIERVDKSCLKPQQRMLALRRHIIPSLYHVLIFSKASKKSLLTLDRNIRSFVKKWCHLPKDTLNSFIHAEIRDGGLGIPNLSLRIPRMTMQRHMRLSASLDPVVQAIYTSIAGQASIARIHKPRRMNNMDIDTKKTEQEVWADELYSRVDGKGLRQHRDSKMINEWVTDCSLKISGADFVRAIQVRSNTLKTPARAARGRTENGNNLCRLDRQVANSNHIFQVCQATHGLRVKRHDEVVDMLKSSMIKRDYVTFKEPKLQYKKTFRKPDLIISKSGKVTILDPIICGDTADLNERRLQKEVLYGEEVLLEEARRIVRAHDPGIQIKETIVLGVPISFRGSLDNFTIRFLKRLGVPRRFLNLIIVRTLVNTYKMFQAYQRMTTAAR

SEQ ID NO: 213 - protein, 1203 aa, synthetic construct
  source 1..1203: note = MG140-69 retrotransposition protein
MAHLAIGIWTNCGPTVRSKQPRKNRRDRVPDGPDQDGPLPGEGELENDQARTVEEIRNPNLTPDHDTEGADENVNIGEGSSNDNTRSATCPICGKSFSGFPGRRLHERKAHATEFHAQESEILHKKINKRWTDTEMYLLAQRDASLQHAGMSNIDRIVELSNEFERSIDTLRKRRTLPEYKVLLDAALEKLTERVELHITPPVQIEPPMEGSNVNKPVQKRVATLWTIEEEMMLANKEAILTIDGKIGSEITEILSNGSSRSKESIRKRRSTQGFKQLVKAKIQELTQPIHLEVITEGPELRQELTQVIHLEVIHEEPELEVQDTPTPPPRLEEEDEAELNRQDMFKHWFTVAGESQMRNLWDPTQRMGINEAHEEIDKYTEEFMQAERLIKAERPTNVDRRKSTPPQGGRNSRRNNLMQLTQKKFEKDPSGCIRAILNDTLVNEGGVDQVLLREYWTEVFNKTPACEVFESKMKHPVLYKLSEPITKNEVEIGLKSLKTKSAAGVDGITCADLKKAKVGKIVTLFRVFQATSYTPARLRLGSVSMVPKVPEPTLPQHYRPITVASMLLRLYHGIIARRFEMLPISPRQKAYKKLDGIAENIWIVSELLELAKKNKKGIALIFLDVSKAFDSVGHPIIQQAAERLGVPKDIRKYLDVLYSTSELVFKGCSQKFKQNGGIRQGCQMSGPLFNGTADLGNEDLDPEVQFMIDEDVGIGEGLFADDEFLAAEGKLALQHQVDRVIPRYKKCGLGMNTSKCKTILIEYNAQTKRYMVNPKPFIKINGEEVPAVSFEETYKYLGVKLGAGTPRHKDILETLKLKLSRIDKSCLRPQQRLMALRRHIVPSLYHVLIFSKATKGSLLTLDRSVRHFVRKWCHIPKDTLNSMIHSDIKDGGLGIPALSLRIPRMAMQRHMRLSASIDPVIQAILKSEAGRASVARIHKTRKVNGIEVDTKQAEREVWTEEMYSRLDGKGMKQHRDSNTINDWVSDCSLKISGADFVRAIQIRLNTLKTPARAARGRRENGNNLCKLDRQVANSNHIFQVCQATHGLRIKRHDEVVDMLKSSMNRKQYSTYKEPRLKYKNTFRKPDLIITKKGKVVILDPIICSDTADLNERRLQKEILYGEEVVLEEARSFVKSHNPGLQIKEIIVHGVPMTFRGSLDNFTVRFLKRLGVPRRYLNLIIVRTLVNTNKMYQAYTRMTTAAR

SEQ ID NO: 214 - protein, 1035 aa, synthetic construct
  source 1..1035: note = MG140-70 retrotransposition protein
MFACSECDGSFGNKGALGNHCKWKHAQTRLPERRAGGEFACPDCDNAYDSLGGLNVHRRAKHPDVYHAARQPAARVRARWSYEEMVLVARAELEIRGTNPPRGVVRVLHSRFPDRTFEAIKCLRNKNPRYKEVIAALEAEGVDEEPPTVTPSEQPHASAQADGLWRDQLQMAIDIGHVGVDDLDWVADGCSAEDIRNKLDELFASWVGHLVRGERAPARSHQPAPGVRDPGRELDPRRRRRAQYSAIQHLYGRKPSAAAHKVLDGSWECDDPVPTPTLEEFRMAWQPIFETPSIKDNRRPTCVGQVRWEIVSPVTPDELNKVLTEGASSAPGPDGVKLKDVIGLGTGELCSHFNLWLLCGSQPSALCVGRTIYIPKGSESNDALKYRPITIASHILRVFHKIMARRFDAFLPLKYTQKGFRSGDGIAQHVLSLQAMIDGAKRRCKPVNLVFLDVRKAFDSVSHDTIVLAMPRLGCPDPFLSYIRDLYSRSSTVIEHNGGRSAPIFTRRGVKQGDPLSPFMFNAVIDWAFSSLDDHIGFSFGHVRVNNLGYADDVALLSDTQAGLRSQLGQFESHLAMGGLTISAGTEGKSASLSIAVDGKAKRWVVDQTPFLATNADIIPALSASGEYRYLGTMLGSGGAKVRSSLRKDLLQGLRNISRAPLKPHQRLRILRIFLLPKYLHELVLAPVADGWLNWLDIAIRANVRQWLKLPQDTPVAFIHAGTGDGGLSVPSLRYSVPVMRRKRLEAVHSATDPISTALAASPFFQKELSGLSCKTLGGRLVTDKHSLAQAWAACLHTKVDGRGLSEARFCTEGSGWVSNPPRNQSGANYIGAIKARGGLLCSKVRSARGDSGRDVRCDSCMRPETAQHIIQVCPRTSGPRMRRHDRVVQFVSAAAERAGYKVLVGPRIVGRTLGVRKPDLVLWNERKAYVADVTVTSDQVGGVKAHRDKVAYYDQPEIREWVEKYTGRSDISFSAVAANWRGVLSPLSADFLKSVLKLSNWDVSLLGLRICEETYHIHRYFGKGTYRIRGRGAS

SEQ ID NO: 215 - protein, 1035 aa, synthetic construct
  source 1..1035: note = MG140-71 retrotransposition protein
MFACSECDGSFGNKGALGNHCKWKHAQTRLPERRAGGEFACPDCDNAYDSLGGLNVHRRAKHPDVYHAARQPAARVRARWSYEEMVLVARAELEIRGTNPPRGVVRVLHSRFPDRTFEAIKCLRNKNPRYKEVIAALEAEGVDEEPPTVTPSEQPHASAQADGLWRDQLQMAIDIGHVGVDDLDWVADGCSAEDIRNKLDELFASWVGHLVRGERAPARSHQPAPGVRDPGRELDPRRRRRAQYSAIQHLYGRKPSAAAHKVLDGSWECDDPVPTPTLEEFRMAWQPIFETPSIKDNRRPTCVGQVRWEIVSPVTPDELNKVLTEGASSAPGPDGVKLKDVIGLGTGELCSHFNLWLLCGSQPSALCVGRTIYIPKGSESNDALKYRPITIASHILRVFHKIMARRFDAFLPVKYTQKGFRSGDGIAQHVLSLQAIIDGAKRRCKPVNLVFLDVRKAFDSVSHDTIVLAMRRLGCPDPFLSYIRDLYSRSSTVIEHNGGRSAPIFTRRGVKQGDPLSPFMFNAVIDWAFSSLDDHIGFSFGHVRVNNLGYADDVALLSDTQAGLRSQLGQFESHLAMGGLTISAGTEGKSASLSIAVDGKAKRWVVDQTPFLATNADIIPALSASGEYRYLGIMLGSGGAKVRSSLRKDLLQGLRNISRAPLKPHQRLRILRIFLLPKYLHELVLAPVADGWLNWLDIAIRANVRQWLKLPQDTPVAFIHAGTGDGGLSVPSLRYSVPVMRRKRLEAVHSATDPISTALAASPFFQKELSGLSCKTLGGRLVTDKHSLAQAWAACLHTKVDGRGLSEARFCTEGSGWVSNPPRNQSGANYIGAIKARGGLLCSKVRSARGDSGRDVRCDSCMRPETAQHIIQVCPRTSGPRMRRHDRVVQFVSAAAERAGYKVLVEPRIVGRTLGVRKPDLVLWNERKAYVADVTVTSDQVGGVKAHRDKVAYYDQPEIREWVEKYTGRSDIFFSAVAANWRGVLSPLSADFLKSVLKLSNWDVSLLGLRICEETYHIHRYFGKGTYRIRGRGAS

SEQ ID NO: 216 - protein, 1035 aa, synthetic construct
  source 1..1035: note = MG140-72 retrotransposition protein
MFACSECDGSFGNKGALGNHCKWKHAQTRLPERRAGGEFACPNCDNAYDSLGGLNVHRRAKHPDVYHAARQPAARVRARWSYEEMVLVARAELEIRGTNPPRGVVRVLHSRFPDRTFEAIKCLRNKNPRYKEVIAALEAEGVDEEPPTVTPSEQPHASAQADGLWRDQLQMAIDIGHVGVDDLDWVADGCSAEDIRNKLDELFASWVGHLVRGERAPARSHQPAPGVRDPGRELDPRRRRRAQYSAIQHLYGRKPSAAAHKVLDGSWECDDPVPTPTLEEFRMAWQPIFETPSIKDNRRPTCVGQVRWEIVSPVTPDELNKVLTEGASSAPGPDGVKLKDVIGLGTGELCSHFNLWLLCGSQPSALCVGRTIYIPKGSESNDALKYRPITIASHILRVFHKIMARRFDAFLPLKYTQKGFRSGDGIAQHVLSLQAMIDGAKRRCKPVNLVFLDVRKAFDSVSHDTIVLAMRRLGCPDPFLSYIRDLYSRSSTVIEHNGGRSAPIFTRRGVKQGDPLSPFMFNAVIDWAFSSLDDHIGFSFGHVRVNNLGYADDVALLSDTQAGLRSQLGQFESHLAMGGLTISAGTEGKSASLSIAVDGKAKRWVVDQTPFLATNADIIPALSASGEYRYLGIMLGSGGAKVRSSLRKDLLQGLRNISRAPLKPHQRLRILRNFLLPKYLHELVLAPVADGWLNWLDIAIRANVRQWLKLPQDTPVAFIHAGTGDGGLSVPSLRYSVPVMRRKRLEAVHSATDPISTALAASPFLQKELSGLSRKTLGGRLVTDKHSLAQAWAACLHTKVDGRGLSEARFCTEGSGWVSNPPRNQSGANYIGAIKARGGLLCSKVRSARGDSGRDVRCDSCMRPETAQHIIQVCPRTSGPRMRRHDRVVQFVSAAAERAGYKVLVEPRIVGRTLGVRKPDLVLWNERKAYVADVTVTSDQVGGVKAHRDKVAYYDQPEIREWVEKYTGRSDISFSAVAANWRGVLSPLSADFLKSVLKLSNWDVSLLGLRICEETYHIHRYFGKGTYRIRGRGAS

SEQ ID NO: 217 - protein, 1035 aa, synthetic construct
  source 1..1035: note = MG140-73 retrotransposition protein
MFACSECDGSFGNKGALGNHCKWKHAQTRLPERRAGGEFVCPDCDNAYDSLGGLNVHRRAKHPDVYHAARQPAARVRARWSYEEMVLVARAELEIRGTNPPRGVVRVLHSRFPDRTFEAIKCLRNKNPRYKEVIAALEAEGVDEEPPTVTPSEQPHASAQADGLWRDQLQMAIDIGHVGVDDLDWVADGCSAEDIRNKLDELFASWVGHLVRGERAPARSHQPAPGVRDPGRELDPRRRRRAQYSAIQHLYGRKPSAAAHKVLDGSWECDDPVPTPTLEEFRMAWQPIFETPSIKDNRRPTCVGQVRWEIVSPVTPDELNKVLTEGASSAPGPDGVKLKDVIGLGTGELCSHFNLWLLCGSQPSALCVGRTIYIPKGSESNDALKYRPITIASHILRVFHKIMARRFDAFLPLKYTQKGFRSGDGIAQHVLSLQAMIDGAKRRCKPVNLVFLDVRKAFDSVSHDTIVLAMRRLGCPDPFLSYNRDLYSRSSTVIEHNGGRSAPIFTRRGVKQGDPLSPFMFNAVIDWAFSSLDDHIGFSFGHVRVNNLGYADDVALLSDTQAGLRSQLGQFESHLAMGGLTISAGTEGKSASLSIAVDGKAKRWVVDQTPFLATNADIIPALSASGEYRYLGIMLGSGGAKVRSSLRKDLLQGLRNISRAPLKPHQRLRILRNFLLPKYLHELVLAPVADGWLNWLDIAIRANVRQWLKLPQDTPVAFIHAGTGDGGLSVPSLRYSVPVMRRKRLEAVHSATDPISTALAASPFFQKELSGLSCKTLGGRLVTDKHSLAQAWAACLHTKVDGRGLSEARFCTEGSGWVSNPPRNQSGANYIGAIKARGGLLCSKVRSARGDSGRDVRCDSCMRPETAQHIIQVCPRTSGPRMRRHDRVVQFVSAAAERAGYKVLVEPRIVGRTLGVRKPDLVLWNERKAYVADVTVTSDQVGGVKAHRDKVAYYDQPEIREWVEKYTGRSDISFSAVAANWRGVLSPLSADFLKSVLKLSNWDVSLLGLRICEETYHIHRYFGKGTYRIRGRGAS

SEQ ID NO: 218 - protein, 1035 aa, synthetic construct
  source 1..1035: note = MG140-74 retrotransposition protein
MFACGQCERTFGNKGALGNHCKWKHAQTRLPERTNGGEFPCPDCDNAYGSSGGLNVHRRARHPDVYHAARQPAARVKARWSYEELVLVARAELEIRGTNPPQGVVRVLHSRFPDRTFEAIKCLRNKNPRYKEVLAALEVEEVDEGLPTVTPSEQTHAFAQADGLWRDQLRMAINIEHLGVDDLDWVADGCPAEDIRKKLDELFASWVGHLVRGERAPARSHQPAAGVTNPSRELDPRRRRRAQYSAIQHLYGRKPSAAAHKVLDGSWECGDPVPTPTLEDFRMAWQPIFETPSIKDNRRPTCVGQVRWEIVSPVTPGELEKVLTEGASSAPGPDGVKLKDVIGLGIGELCSHFNLWLLCGSQPSAMCVGRTIYIPKGSESNDALKYRPITIASHILRVFHKIMARRFDAFLPLKYTQKGFRSGDGIAQHVLSLQAIIDGAKRQRKPVNLVFLDVRKAFDSVSHDTIVLAMRRLGCPDPFLSYIRDLYSRSSTVIEHNGERSAPIFTRRGVKQGDPLSPFMFNAVIDWAFSSLDDHVGFSFGHVRVNNLGYADDVALLSDTRAGLRSQLGKFESHLAKGGLTISAGTEGKSSSLSIVVDGKAKRWVVDQTPFLATNEGIIPSLSASGEYRYLGIMLGSGGAKVRSSLREELLQGLQNITRAPLKPYQRMRILRNFLLPKYLHELVLAPVADGWLNWLDTAIRANVRQWLKLPQDTPVAFIHAGTGDGGLSVPSLRYSVPVMRRKRLEAVHSATDPLSTALTASPFFQKELSGLSRKTLGGRLVTDKQSLAQAWAGCLYTKVDGRGLSEARSCAEGSRWVSNPPRNQSGANYIGAIKARGGLLYSKVRSARGDSGRDVRCDSCMRPETAQHIIQVCPRTSGPRMRRHDRVVQFVSAAAERAGYKVLVEPRIVGRTLGVRKPDLVLWNESRAYVADVTITSDQVGGVKAHRDKVAYYDQPEIREWVERFTGLSHISFSAVAANWRGVLSPLSADFLKSVLKLSNWDISLLGLRICEETYHIHRYFGRSTYRVRGRGPS

SEQ ID NO: 219 - protein, 1105 aa, synthetic construct
  source 1..1105: note = MG140-75 retrotransposition protein
MKCLRYISGLYWKISLLVANMFARLRPGRTSVSDTQNNLNTIGASNEAPTDTFPIGENDNTSSIFVCQYCQKVFQTNRGLANHQRSKHEEIYHASNVPKARKKARWDDEELVLLAREEIRLTDLRVRNINAELIKVLPHRTLESVKGVRRKTNKRYHDLLGKLRSDPSSVVDPNGRAESVRGGAPPEGVFDPGRSWRADDQSLHLDHDSWIAKVRNEIDEFEFLTGLDVGLIKPDCLTEEDKEGVNLDFDRWVESMTVRNRTEVVPPGPKRRGRVGVRREGESTTTTSVGIVPPNARSSKRRKRKHPNSSWGRKAAYKRTQDLFRKNKSRCAQDILSGSWERPRRGLPLEDQEPYWREILEQESVEDLRTPEQVGPVLWSMIDPISSAELEAIMKAMKPGAPGPDGMVLSQLKQLNGEEVRARFNLWLLAGYCPTSCCMGETVLLPKDQNDIRPPKHRPITMANLIVRCYHKLMARRMGELMPISDRQKAFRAGDGLGENVLLLRAIIKHHTRECLPLNVVFLDISKAFDSVSHQSILIAAKRMGVPPPLLSYLHEYYSRSQTRLRVGGRKSEPISVRRGVKQGDPMSVHLFNAVIDWALSTLDPDLGIKLNGVNLNHLAFADDIGLLTKTSVGAQSQIDRLNDHLNKCGLFISAGSTGKSASLKIDVDGRRKLWVVNPNVHLHVADEDIPAKSIGETYEYLGVPLSAKGAIPQSAHKLQKYLDNLTRAPLKPQQRLYILKRHVIPALYHQLVLSDCSKGLLNFLDVKIRGAVKRWLKMPKDTNDFFIHAPVIEGGLGVAVLKNAIPLMRKSRLEKLLGSNDPAVAAVAGTSFVADMLRSDSVPLQVAGIPICNKENLKRALAYGLHRSVDGSGLNKCSQISIANKWVDSPTHLMSGANYIGAIKVRGNLMATAARMARGRPQRDVACDACGRTESLGHILQVCPRTSGARIDRHNSVLARTVKVLVRNHWSVLVEPAIPTPAGIRRPDIIAWKGGSTCYVIDVTVVSDNADLDRVHQLKIEHYNTQHVRDWALRVSGTASVTFSSISFNWRGALAGPSYDLLKNSLALGEYDIVLLATIVMEKGYQTWLDFKRSTFRERSWNNG

SEQ ID NO: 220 - protein, 1112 aa, synthetic construct
  source 1..1112: note = MG140-76 retrotransposition protein
MARAHREVTDQATKEDHNSRRLVRWTPAELLDLAEKEALLMKKGVKFMNEALFPLCPGRSLEAIKGQRRKEAYKELVKAELAKLVTEGLCIAGDEGEGASVEGEEGRGEGQGPSRSGPASGTLDTTQRRLNQRIEPERQNDRQNPLLGTEGRATGLAHLRRDALREGQRQIDMTDSQPEGEEHLTPNVAELLQGAEGEVEDGESSCIWTQDVATQEELDEFIRKSTMTIAQRKKAKYEHCRILKGQMELYKDIIGNVWDHEEETGVGADRKVIDDWVREQLLKWVRWEGNPKPKPVRQPDKKQPFISKKKEKARLRQLTQSFYERSPSRCINAVLSGNLEVTQVIPKKELEEYWASIFSRKPEGIVKVDTINRPADTSYSSPISLDEVKEGLRNLKDNSPGPDGLKKSDVAKIPVQVLHAMLLIFQGSSYTPKFLRLGNVTLVPKNAKPENPGQYRPITVTSQLLRLYHGILAKRLVRLPLSKRQKAFLPRDGIAENAFIIEHLIKGARARREDLFLVFMDVAKAFDSLAHTSLLQAAERIGIPASLREYIALVYEEAEIQFKGGEKKIKQTMGIRQGCQKSAPLFDASLDMCYEKLDPRIGYRVPDPAAPQELCSITQKMRPGGYDITEALFADDGVTVAATRIGSVKNTLLAVRELGKCGMKMNPKKCATLAIRANGRLKKSYVDPTPYLTIDGEVVPALKLGETYKYLGLKIGANGYDIREITKKLIVQLDRLSEASFKPQQRLHALKVNVIGGMLHTLVLVHVSLKTLLNIDRTIRRYVRKWLHLQSDTPTAMFHANTADGGLGIPSMVTRIPRLRRARLVKMTQSDDPLIKIMVSSGTGEAAVRLASGIKRLGEVQITNKQSERRAWREELISKTDGRGLQYHDGFGDGWILDPLFPAKGGEFIKALRVRCNDMKTPARAVRGDRGDPTCRLDKQTANATHISQICQVTHGLRVKRHDGIVKMVRAGLQRVGFTVQLEPKIAIEGTFFKPDIVPWKKDKGFVIDPIICGDNCDIEERYRQKVTAYDKDAVKRYVKEEALRVSGATVKAVEVHGFAINFRGGWSTSTQKLLSRLGLGASLKHFISIRTLTTTWTIIQTYGRVSLGHRK

SEQ ID NO: 221 - protein, 1112 aa, synthetic construct
  source 1..1112: note = MG140-77 retrotransposition protein
MARAHREVTDQATKEDHNSRRLVRWTPAELLDLAEKEALLMKKGVKFMNEALFPLCPGRSLEAIKGQRRKEAHKELVKAELAKLVTEGLRTAGDEGEGASVEGEEGRGEGQGPSRSGPASGTLDTTQGHLNQRMEPERQNDRQNPRLGTEGRATGLAHLRRDALREGQRQIDMTDSQPEGEEHLTPNVAELLQGAEREVEDGESSCIWTQDVATQEELNEFIRKSTLTTAQSKNAKYEHCRILKGQMELYKDIIGNVWDHEEETGVGADRKVIDDWVREQLLKWVRWEGNPKPKPVRQPDKKQPFISKKKEKARLRQLTQSFYERSPSRCINAVLSGNLEVTQAIPKKELEEYWASIFSRKPEGVVKVDTINRPADTSYSSPISLDEIKEGLRNLKDNSPGPDGLKKSDVAKIPVQVLHAMLLIFQGSSYTPKFLRLGNVTLVPKNAKPENPGQYRPITVTSQLLRLYHGILAKRLVRLPLSKRQKAFLPRDGIAENAFIIEHLIKGARARREDLFLVFMDVAKAFDSLAHTSLLQAAERIGIPSSLREYIALVYEEAEIQFKGGEKKIKQTMGIRQGCQKSAPLFDASLDMCYEKLDPRIGYRVPDPAAPQELCSITQKMRPGGYDITEALFADDGVTVAATRIGSVKNTLLAVRELGKCGMKMNPKKCATLAIRANGRLKKSYVDPTPYLTIDGEVVPALKLGETYKYLGLKIGANGYDIREITKKLIVQLDRLSEASFKPQQRLHALKVNVIGGMLHTLVLVHVSLKTLLNIDRTIRRYVRKWLHLQSDTPTAMFHANTADGGLGIPSMVTRIPRLRRARLVKMTTSDDPLIKIMVSSGTGEAAVRLASGIKRLGGVQIINKQSERRAWREELISKTDGRGLQYHDGFGDGWILDPMFPAKGGEFIKALRVRCNAMKTPARAARGDRGDPTCRLDKQTANATHISQICQVTHGLRVRRHDGIVKMVRAGLQRIGYTVQLEPKIAIEGTFVKPDIVAWRKDKGFVIDPIICGDNCDPEERYRQKVTTYDKEAVRKYVKEEALRVSGANVKEVEVHGFAINFRGGWSTSTQKLLSRLGLGTSLKHFISIRTLTTTWTIIQTYDRVSLGYRK

SEQ ID NO: 222 - protein, 1112 aa, synthetic construct
  source 1..1112: note = MG140-78 retrotransposition protein
MARAHREVTDQATKEDHNSRRLVRWTPAELLDLAEKEALLMKKGVKFMNEALFPLCPGRSLEAIKGQRRKEAHKELVKAELAKLVTEGLRTAGDEGEGASVEGEEGRGEGQGPSRSGPASGTLDTTQGHLNQRMEPERQNDRQNPRLGTEGRATGLAHLRRDALREGQRQIDMTDSQPEGEEHLTPNVAELLQGAEREVEDGESSCIWTQDVATQEELNEFIRKSTLTTAQSKNAKYEHCRILKGQMELYKDIIGNVWDHEEETGVGADRKVIDDWVREQLLKWVRWEGNPKPKPVRQPDKKQPFISKKKEKARLRQLTQSFYERSPSRCINAVLSGNLEVTQAIPKKELEEYWASIFSRKPEGVVKVDTINRPADTSYSSPISLDEIKEGLRNLKDNSPGPDGLKKSDVAKIPVQVLHAMLLIFQGSSYTPKFLRLGNVTLVPKNAKPENPGQYRPITVTSQLLRLYHGILAKRLVRLPLSKRQKAFLPRDGIAENAFIIEHLIKGARARREDLFLVFMDVAKAFDSLAHTSLLQAAERIGIPSSLREYIALVYEEAEIQFKGGEKKIKQTMGIRQGCQKSAPLFDASLDMCYEKLDPRIGYRVPDPAAPQELCSITQKMRPGGYDITEALFADDGVTVAATRIGSVKNTLLAVRELGKCGMKMNPKKCASLAIRANGRLKKSYVDPTPYLTIDGEVVPALKLGETYKYLGLKIGANGYDIREITKKLIVQLDRLSEASFKPQQRLHALKVNVIGGMLHTLVLVHVSLKTLLNIDRTIRRYVRKWLHLQSDTPTAMFHANTADGGLGIPSMVTRIPRLRRARLVKMTTSDDPLIKIMVSSGTGEAAVRLASGIKRLGEVQIINKQSERRAWREELLSKTDGRGLQYHDGFGDGWILDPMFPAKGGEFIKALRVRCNAMKTPARAARGDRGDPTCRLDKQTANATHISQICQVTHGLRVRRHDGIVKMVRAGLQRIGYTVQLEPKIAIEGTFVKPDIVAWRKDKGFVIDPIICGDNCDPEERYRQKVMTYDKEAVRKYVKEEALRVSGANVKEVEVHGFAINFRGGWSTSTQKLLSRLGLGTSLKHFISIRTLTTTWTIIQTYDRVSLGYRK

SEQ ID NO: 223 - protein, 976 aa, synthetic construct
  source 1..976: note = MG140-79 retrotransposition protein
MRGLNQHIRRGDAKHQEDYHQQQEVSRTKARWDQEEIYMVAKMELKLIDKGCKSIVKELQRSFPHRSLDAIRSLRTKKEQYKQCIEELKVATTNKNANMESTKEDMAKAGSNTSEERDLDSNGRTLFWENNTEPELELVNNWKMLTERNEEIIRKLIDQDIESWLPPKTKRCQAPSKCKQPCKINAKKKRKQEYASIQNLYRKNRGAAIRKILDGKWKNECTEGPSPKTLQRFWKNLFERHSGNDERQPNMKGPTIWELEAPITKREVDQAKKNQSKDSAPGLDNVTTKQLQAIPSMAIAKRFNAWLVSAYVPNRCRQGVTVLIPKVKGTMLPECHRPITMAPTILRLFHRILTARMMNNLPFSNRQKAFRKGDGIAQNLITIKSIIERSQKKLTSLSLAFLDVQKAFDSVNHSTIIKACRRMGIPNMLLSYIENLYQGSTTRLRIRNKLSPEIWINRGIQQGDPLSVPLFLAVMDWVTSNLDPGIGVSMGEAKINHLAFADDLVILSTTDKGLQQQMDRIIEGLSQCGLNINPKKCATFRLRIDGSKKRWTINPEPFLKCQGTIIPSVTVSTFYKYLGIKIGIMSNTSFITENLEPKLGYLTKAPLKPQQRLYSLIVHLIPGLQHSLTFMRTTKKFLKSLDLRIRAAVRGWLKIPKDVPNAFYYTKIHLGGIGIPQLENIIPLMKTNRIGKFCDDADDFSKEIIRQDALPKMCKNWSNPLKVHGFTVTTKKEIEETIAETLYKTVDGRGLKHESETSTVNRWVSNGTGLLSGRDYIGAIACRGGFLHTRLRAARGFPGATVLCDCCNQTESLGHILQTCYRTHKERINRHNRIRDLTAARIRKKNWNIIKEQAIPTQAGIRKPDLICYKESEAVVLDVTIVNDKFSLEDACKRKIEYYRKEDIIRWIKLETGVITVTFGAVVASWRGCVAESTNRLLTYQFGLTNDFFSLLGAIVCTYGYYEWRHFKNATYRIPR

SEQ ID NO: 224 - protein, 1000 aa, synthetic construct
  source 1..1000: note = MG140-80 retrotransposition protein
MPDCLSGEGGDPSRRCPLCSRQFKSKAGLSLHLRKGNKEHQEFYHNSQKVVKTKTRWDEEELYLLASEELRLINNKCKAINKELTNKFPHRTMEAIKGVRRQTKYKQLLDRLRDSELERNLNGEESNSGPMKNDQENRISDISPRSSTNPSISIFWENNHKKELDLLHQWSIFSTCDMEEVKTKIDKDLDELLPSRVLKDNTKLIVTSKKTNKKQKRRKEYALIQKMYRKNRSKTIRKVLDGEWKIKNSTEPKLADLEPFWRNIFEKGSEEDHRNPQCKESVVLELEAPITVEEVEYTKRSQKKDTAAGPDGITCKDVMNISSLKLAQRFNVWMFTGYIPQRNKQGLTVLIPKKKGDMRPESFRPITMMPTVIRLFHRILARRMMAQLPINKQQKAFRKGDGIAFNLITVQALLEHHTKNLKPLSGAFLDIRKAFDSVNHSSLHLACKRIGIPDMLLNYIKTLYTGSTICLRVQGEISDPICVNRGIRQGDPLSVPLFLAIMDWAIDGLNTSLGASIGKERINHLAFADDMVIFAASDLGLQYQITHLEKELSKSGLNFNPSKCSSFRLTIDGKKKKWIMNPDKFLKCAGELIPTIKIGSFYNYLGIKIGCMNNSQFVTDVLEKKLTFLTKAPFKPQQRIYTLIKHLIPSLLHPLTFMSTSNKFLKSLDLRIRSACRKWLKMPKDITKGFFHSEPGVGGLGIPQLEYRIPLLKTKRIANFCNEDNTWGNNLITEKALPNMCTKWLKSMKIDGRIITNKKELDEAISNTLHNSADGRGLKDSSTVKSSNYWVSNGSLLLSGRDYIGALACKGGYLHTGLRALRANKNNNALCDCCGRVESLGHILQSCSRTHNHRLARHNRIRDILASRVRKKDWSILKEQAIPTSAGIRRPDLIFFKDNLALVVDVTIVADTANMFEPYEHKVRYYKTTEITNWIKQETGCTDIEYGALVINWRGAICKNSYDLLDTYWKFPGDFYSLLSAITCTYGYYSWRHFKTSTYR

SEQ ID NO: 225 - protein, 979 aa, synthetic construct
  source 1..979: note = MG140-81 retrotransposition protein
MAANPVNDQGKPSQHFPCDGECIICTPRHDAGDPSAARDKFRHAFIGKRRLVKHLKDVHGVREQDITWRCQRCHELHTTYIEASVHFAQCRPRSINGDVEGIGAVTDCRRSSDPEADALERRGTVEGDLIQRSGRNPEGDVERTPSQTRNEQTEILEEPIPPPIHERPVEHQAETNIHICPECQRVFDTKAGLQLHRRNAHREAYNRTLPEPSRRAQFPEEVLRDIAGACLDHPGRAACGKGISQYAVSRFPAYSAEQINALRKRSKYREVELKVRQEREAAVRNAAAVDIPTPDETPHVAGRRERSPEGGLPPPEVPPRDERRTERVERPENLRTEAERRAWDYYDAVCEGGDMNALYEELMEELVTPYRERGRAPRPHRGNQGARAQGPGPSNTATEPATPLIANRNQRKRARYALHQKLYRKGPSALMSELRDPGSTGVTTLPDTAEVARVYGDRFGSDSPQDTHAFQPKAGAEVVELKPFSRGEVLDVIKGIKLDSAAGPDLVTSKMIFEWGVDVLRPIVNSFLRLGRIPDSLRINRTTLIPKKADPESVNDYRPITIGSLVNRAYAKLLTKRLCDKVSLNSRQKAFVPVDGCSEHLFVVGEALEICQKRRKECNLVFLDLAKAFDMVSHCSITRALNRFGVGSGFVEIVADLYAGVSTVIRGKQGPTDQINMARGVKQGCPLSPMLFNMVMDELVDQLGPRHGLKPRPELEAFNCLAFADDLVIASGTVHGMTQLLVTVREFFDDRSMSVNAAKSHTIRLAPAPGTRTVKVVEGSTFSYGGTPIMNRSINETVKYLGLALSPKGPTNFKRDKAVTDLKLIREAALKPEQKLDLIRRILLPAQMHTLRLSRRVLLRELDQLDRIVRRTVRGILHLPPGTPKAFFYMKSVDGGLALPEVTSTVGYTRLKRFVRLKANGDPLVAKYAAASNKLERELRYWVGALGIEDTSLSRLNTAIFYYALVCANAKYKQIFHQK

SEQ ID NO: 226 - protein, 1121 aa, synthetic construct
  source 1..1121: note = MG140-82 retrotransposition protein
MEKSSCRICQEDLPENNLQIREHINDVHNIAEIIYRCKLCTKNYNTISSIKSHYPACKRKIGTNIPPNNTIRNIASQVAPPPTPAPTTTNTNNNIAFQCKECQKGNVTFVAKDNKGLVTHMRTKHVQAYEESKKVANIRIAWSNDEDRILASLELQLKAVHKGQILERLTTEWQKLVQESRANVRSKEAIRGRRQQTEYKRTLEELSNTPNGQPTPTTRSPQGQTTTTDNASSVNVDSESIGEIKEALKTYLTAGHTNLTDHMKDAINGFIDNTNSVDPVQLTMSGIMESITTMRNRVGARNQRIPNIPKKTTKNQTRKRKAEMRAYYQKLYAHNKSRLMDEIIEGVAPNTEPPPIHETVKFYENIWSVRAEDNHAVSKKTGIAGDNRTLLSPITKPEILTAISKTKRDSAKGIDTITLHEAKQLANDDLFVAFNIWLGCKSIPAALKLNRTTLIPKGNQNLDKVTNWRPITISSILLRLFNKIMAGRMSKFFQMDKRQLGFTPINGCSMNIAWLNLLLKHARLNKKEINVCLIDVAKAFDSVPHDSIFRALRRHNAPPHLIELIQQQYEDSSTTITYQNLSSKKIKILRGVKQGDALSPLLFNLVTDELFQILGDRFGYTIDNIGSTNIRCFADDMCLVSGTKVGMGNMIRESTQFLNERGLQINPNKCMTIALEKGYKGKKSKIVIEPVFTIQGAPVPILGHTTNTTKYLGVKFTSVGSIKATVIKEQLISVLEKLQKVSLKPFQKIDLLRSHVIPLFVYQLINLELYPKLVKQIDLIIRRTIRSILHLPTSLSNEFFYLSVREGGLGFPVLKNSIGLAKVRIYKSIMRSEDEFLKHLIETHGFPIIRRFLDDLQVSSSFENDDLAQRKRELKIERNNSFAQKVHGYGSEIFAKCPLTNSWLHAGYKTLTGRNYINGIKLRTNTFETKVTTNRGLAVDKTCRRCHKENESLMHVIQFCNNTKGLRYRRHNQICSRICQKLRERGFDVFSEKAFTTDVTGLPNLLRPDIIAKKDGKAIIIDVQCVYESTTGSFTNAANSKIQKYTPLIEAVKNQLNCTEVEVTAMIVGSRGSFHRGHLHQWYQMGFSTTELKYLALNCMENSIRILLSFNRGCQGSTDNP

SEQ ID NO: 227 - protein, 1121 aa, synthetic construct
  source 1..1121: note = MG140-83 retrotransposition protein
MEKSSCRICQEDLPENNLQIREHINDVHNIAEIIYRCKLCTKNYNTISSIKSHYPACKRKIGTNIPPNNTIRNIAPQVAPPPTPAPTTTNTNNNIAFQCKECQKGNVTFVAKDNKGLVTHMRTKHVQAYEESKKVANIRIAWSNDEDRILASLEIQLKAVHKGQILERLTTEWQKLVQESRANVRSKEAIRGRRQQTEYKRTLEELSNTTNGQPTPTTRSPQGQTTTTDNASSVNVDSESIGEIKEALKTYLTAGHTNLTDHMKDAINGFIDNTNSVDPVQLTMSGIMESITTMRNRVGARNQRIPNIPKKATRNQTRKRKAEMRAYYQKLYAHNKSRLMDEIIEGVAPNTEPPPIHETVKFYENIWSVRAEDNHAVSKKTGIAGDNRTLLSPITKPEILTAISKTKRDSAKGIDTITLHEAKQVANDDLFVAFNIWLGCKSIPAALKLNRTTLIPKGNQNLDKVTNWRPITISSILLRLFNKIMAGRMSKFFQMDKRQLGFTPINGCSMNIAWLNLLLKHARLNKKEINVCLIDVAKAFDSVPHDSIFRALRRHNAPPHLIELIQQQYEDSSTTITYQNLSSKKIKILRGVKQGDALSPLLFNLVTDELFQILGDRFGYTIDNIGSTNIRCFADDMCLVSGTKVGMGNMIRESTQFLNERGLQINPNKCMTIALEKGYKGKKSKIVIEPVFTIQGAPVPILGHTTNTTKYLGVKFTSVGSIKATVIKEQLISVLEKLQKVSLKPFQKIDLLRSHVIPLFVYQLINLELYPKLVKQIDLIIRRTIRSILHLPTSLSNEFFYLSVREGGLGFPVLRNSIGLAKVRIYKSIMRSEDEFLKHLIETHGFPIIRRFLDDLQVSSSFENDDLAQRKRELKIERNNSFAQKVHGYGSEIFAKCPLTNSWLHAGYKTLTGRNYINGIKLRTNTFETKVTTTRGLAVDKTCRRCHKENESLMHVIQFCNNTKGLRYRRHNQICSRICQKLRERGFDVFSEKAFTTDVTGLPNLLRPDIIAKKDGKAIIIDVQCVYESTTGSFTNAANSKIQKYTPLIEAVKNQLNCTEVEVTAMIVGSRGSFHRGHLHQWYQMGFSTTELKYLALNCMENSIRILLSFNRGCQGSTDNP

SEQ ID NO: 228 - protein, 1085 aa, synthetic construct
  source 1..1085: note = MG140-84 retrotransposition protein
MYRVAAVNSRGTGSNNNNQALLSRTSSLIKIASERPIDVLALTETHHSNVHNDLSAAAQESGYSIAAHSQRPQSGRNSYAGIILLCRRDSVTRTTQLPPFTDEALSGRALAVTVEFADASTWNLLFVYAPATNRLRPAFFKLLASSLPEGFTPDMCIGDFNMNANRPTPKYFVKFCSNVDLHDSWEPNGDCPWFTFHRNKFRSRIDLSLISAPMLKSQRVITTHQVLHSKLDHLAVISEISHLPCVHTPCSNKKFRLFDPSLASSKLLNMDIEKACKEYRHDQCIELYDRILNICNMHDEMTTQRKRRLARERRLLAEANSTDLDTCIAQSIKREIQALESTTGRIQDALNLKNSLAPGKYGYIKHVMRNALPESSIGALIDQNNTLRDASEAHLVLGETLNNVCGTTIPTDITYLDKFGEHWPDEMKCSMEHVTSTISLNEMETTLKGLEGAKSPGPDRLPAWLFKRFAKQLAPFLVNLMNGILDGDEMPECFKESRTIYILKKQGLDKTITSNYRPISLMNVIAKVFASIINRRLRHKIELVISKSQHGFTPNRSILDAILNVDTILKSLKDDGKASAVFLDIAKAFDSVEHSAILYAMKCAGFNDTVVQLINRWISNNHTTVIVNGKKSSPIHLARGVRQGDPLSPILFVLTMDLLHKRITGRIKGIKPMKDFERIPIAGFADDTALFPRNDFQLKRCMSMLRHFKLATGMEIAIHKCSYVTKNENSEKRLHNLNMKPIPNITDKDTERYLGAELHSAGVKDTLSIRIDKAIKKMEMLRGIKYIHQRAKVVKTFIWPMLYYWFSFEELSKEDANRLNTATWNYVYTGHPSFKSKLSKIKRQQDANKFSDGGIGLFDIWEFANHQNAKQYNTALSKQNDQVWAHKWINKPNKKARNFKKKWKKATYEQNMKDLNEWKKYQPKPPEIKLECQTSKPKIWNKIISLPVHPTVKNFIFKRCRRMVRTVKECIYCQESGYTHIIHGECQMNQGNKYSMEDFLNSFNNRKHNQGLDWSGVTPHVTPAEVANTWYANWFTYQAENNWLDGEHTNTPPSTTESSNAIRAKVLETLSQITGQLTPNPLGSM

SEQ ID NO: 229 - protein, 1200 aa, synthetic construct
  source 1..1200: note = MG140-85 retrotransposition protein
MHESQAHQPEYKKELESKHDDKQPEHVSLEKLAALEATSKVVSIKAMTAATGLTTHQVRYLREKAIYKQYLDKAKKEQAAKAKSIFKAAPKPSTLLSTASRIVPTASASGASRKTAVQPPNALPTQARRETPPASDASTCTACTKVTTSGRDHTPLPPAATTQPSPPSHIFTEDNKRRRISSPSLPPGLASDTKKKRTMGSPQRPTPPCRQTIQTSGTAAATLSRTKQQQATLGIVPPAAASKPSSVSAPPAASAAANTPKRQRSPSQSPQAQQAPALRAAHTRILSPNTNTPTSQPTGSRTPLNPASTPRRDKMEAEFRQALEATLVVEEPCPGLHKIVRSALSDSPDRLQIAIDDFYENAWVREKPRKARKPPRPPHNYGNLHHGRGRRAAEYKKAQDMFARDKKGLADVILEGKELLTPPELPSLASTEDLFAGIWESGSTSDQQRPYVPHFSARALPPIFANDVELARERWHRAGAGLDGITIPQVCRMDPNMLATLFNIIIMRGIFPSAWRDLRTVLIHKGGIRSDPNNWRPISIASALQRLFHRILLRHLSAITSLDHSQRGFRSVDGTFANAVLLDGYIRSRRAAGKSFNIVGLDLRKAFDSVSHEAIRTAIANAGVDHRLAGYLLATFQGSRTHLELGPSRSRPIHLLRGVKQGDPLSPLLFNLVLDPMLTYLATNFKGGTLPGGAKVPAIAFADDIFLLSDDDSEIPLMLYAFGEYLAQQGLAVNPRKCVSISATTVQGKTMVRTKCLFRIGGALIPTVGSVNTFKYMGHQFGERGLQQSSLTTLNTWLERLSRAPLKPHQRMALLRDHVIPKLLHGLTSPVTTGEKLREADRMIRRFVKRTLHLQEHTANQFIHARLRDGGLGITELRRAVPEITLKRCRGLLTVPDDPTLASFGSSEYFETILARVSRLAGARPCHEVHREQIRTGAFSAGLELVSDDIASRQWLTTKPQGWTGRDFVKAVHLRTNNLPTMDHPSNPPHLRLCRAGCQKNESVKHILQQCQQVDGLRSKRHNEIAAKIARAASKKWEVEWEPRVLGLPDINNKRQLFKPDLAIHKPEHLVIVDVQVSWENSEASIREAWDVKRAKYSSPEFLAAAERRWPGRRITTLPLILGARGIWPNINRVTADELQLSAAVKRSCVESCLKWGPSMHRTFMAGVWASSREGRPNGIGYRSARRPTNNQSAISSRGG

SEQ ID NO: 230 - protein, 1200 aa, synthetic construct
  source 1..1200: note = MG140-86 retrotransposition protein
MHESQAHQPEYKKELESKHDDKQPEHVSLEKLAALEATSKVVSIKAMTAATGLTTHQVRYLREKAIYKQYLDKAKKEQAAKAKSIFKAAPKPSTLLSTASRIVPTASASGASRKTAVQPPNALPTQARRETPPASDASTCTACTKVTTSGRDHTPLPPAATTQPSPPSHIFTEDNKRRRISSPSLPPGLASDTKKKRTMGSPQRPTPPCRQTIQTSGTAAATLSRTKQQQATLGIVPPAAASKPSSVSAPPAASAAANTPKRQRSPSQSPQAQQAPALRAAHTRILSPNTNTPTSQPTGSRTPLNPASTPRRDKMEAEFRQALEATLVVEEPCPGLHKIVRSALSDSPDRLQIAIDDFYENAWVREKPRKARKPPRPPHNYGNLHHGRGRRAAEYKKAQDMFARDKKGLADVILEGKELLTPPELPSLASTEDLFAGIWESGSTSDQQRPYVPHFSARALPPIFANDVELARERWHRAGAGLDGITIPQVCRMDPNMLATLFNIIIMRGIFPSAWRDLRTVLIHKGGIRSDPNNWRPISIASALQRLFHRILLRHLSAITSLDHSQRGFRSVDGTFANAVLLDGYIRSRRAAGKSFNIVGLDLRKAFDSVSHEAIRTAIANAGVDHRLAGYLLATFQGSRTHLELGPSRSRPIHLLRGVKQGDPLSPLLFNLVLDPMLTYLATNFKGGTLPGGAKVPAIAFADDIFLLSDDDSEIPLMLYAFGEYLAQQGLAVNPRKCVSISATTVQGKTMVRTKSLFRIGGALIPTVGSVNTFKYMGHQFGERGLQQSSLTTLNTWLERLSRAPLKPHQRMALLRDHVIPKLLHGLTSPVTTGEKLREADRMIRRFVKRTLHLQEHTANQFIHARLRDGGLGITELRRAVPEITLKRCRGLLTVPDDPTLASFGSSEYFETILARVSRLAGARPCHEVHREQIRTGAFSAGLELVSDDIASRQWLTTKPQGWTGRDFVKAVHLRTNNLPTMDHPSNPPHLRLCRAGCQKNESVKHILQQCQQVDGLRSKRHNEIAAKIARAASKKWEVEWEPRVLGLPDINNKRQLFKPDLAIHKPEHLVIVDVQVSWENSEASIREAWDVKRAKYSSPEFLAAAERRWPGRRITTLPLILGARGIWPNINRVTADELQLSAAVKRSCVESCLKWGPSMHRTFMAGVWASSREGRPNGIGYRSARRPTNNQSAISSRGG

SEQ ID NO: 231 - protein, 1200 aa, synthetic construct
  source 1..1200: note = MG140-87 retrotransposition protein
MHESQAHQPEYKKELESKHDDKQPEHVSLEKLAALEATSKVVSIKAMTAATGLTTHQVRYLREKAIYKQYLDKAKKEQAAKAKSIFKAAPKPSTLLSTASRIVPTASASGASRKTAVQPPNALPTQARRDTPPASDASTSTACTKVTTSGRDHTPLPPAATTQPSPPSHIFTEDNKRRRISSPSLPPGLASDTKKKRTMGSPQRPTPPCRQTIQTSGTAAATLSRTKQQQATLGIVPPAAASKPSSVSAPPAASAAANTPKRLRSPSLSPQAQQAPALRAAHTRILSPNTNTPTSQPTGSRTPLNPASTPRRDKMEAEFRQALEATLVVEEPCPGLHKIVRSALSDSPDRLQIAIDDFYENAWVREKPRKARKPPRPPHNYGNLHHGRGRRAAEYKKAQDMFARDKKGLADVILEGKELLTPPELPSLASTEDLFAGIWESGSTSDQQRPYVPHFSARALPPIFANDVELARERWHRAGAGLDGITIPQVCRMDPNMLATLFNIIIMRGIFPSAWRDLRTVLIHKGGIRSDPNNWRPISIASALQRLFHRILLRHLSAITSLDHSQRGFRSVDGTFANAVLLDGYIRSRRAAGKSFNIVGLDLRKAFDSVSHEAIRTAIANAGVDHRLARYLLATFQGSRTHLELGPSRSRPIHLLRGVKQGDPLSPLLFNLVLDPMLTYLATNFKGGTLPGGAKVPAIAFADDIFLLSDDDSEIPLMLYAFGEYLAQQGLAVNPRKCVSISATTVQGKTMVRTKSLFRIGGALIPTVGSVNTFKYMGHQFGERGLQQSSLTTLNTWLERLSRAPLKPHQRMALLRDHVIPKLLHGLTSPVTTGEKLREADRMIRRFVKRTLHLQEHTANQFIHARLRDGGLGITELRRAVPEITLKRCRGLLTVPDDPTLASFGSSEYFETILARVSRLAGARPCHEVHREQIRTGAFSAGLELVSDDIASRQWLTTKPQGWTGRDFVKAVHLRTNNLPTMDHPSNPPHLRLCRAGCQKNESVKHILQQCQQVDGLRSKRHNEIAAKIARAASKKWEVEWEPRVLGLPDINNKRQLFKPDLAIHKPEHLVIVDVQVSWENSEASIREAWDVKRAKYSSPEFLAAAERRWPGRRITTLPLILGARGIWPNINRVTADELQLSAAVKRSCVESCLKWGPSMHRTFMAGVWASSREGRPNGIGYRSARRPTNNQSAISSRGG

SEQ ID NO: 232 - protein, 1246 aa, synthetic construct
  source 1..1246: note = MG140-88 retrotransposition protein
MGDRVKTAQDAGSKTSSCQRDAPPANAQFVCVSCNSRFDRKSSLSLHSKSCGNTRTKCNYCTVSLTTYKLIRQHERRHHNAEYMRDLEAEKPTPDSAYFAKLAAMEAAAKGGVVSIAAMVTATGLTTHQIRTKRSKPVYQKYLEMAKRDQVAKSKLLFGATSSATSPSTSTSVTNATTTASPPSRAVTVSRQHSADGTAPRKNASSSYTRGPCPKASTSASPPGPPPPSVARIETQTDDGKRRRLSSPTVPAGVPTSERKKKRLQGSPLRPTTSRLLPNTTSASATGLPADTPQENASPGPDPPPAAPNKPADRPPAPLGDESALQQPEAPITSCKRLRSPSLSPAMPLAPALRRTSATVTPLRTRLPHAPPPRLNRDSAMASEFRLALEAVLEAEEPCPGIHRLVTSALSDNNSMFQARLDEFWAATWPTTTSRERRRPPRPSGYGSVHHGKGTRAAEYKKAQELFGKDKRGLANTILEGRPILTPPEVPSIQQVEDVFAAIWEADVADGPIAATSPHIPVPSMPPIFEADVQLAREHWMKSAPGPDGITVAQVCRMNPRVLATVFNILLLRAAVPSSWRVLRTVLIHKGGSRTDPNNWRPLTIASTLQRLFHRVLLRHLTSHTTLHPSQRGFRSVDGTFANAVILDAYIKSRTGQGKAWNIVGIDLSKAFDSVSHNAISKALALAGVDERLATYIITSLTGCATQLDLGGKKSRPINIQRGVKQGDPLSPLLFNLVLDPILQHISTCFKGGTIPGGDKVPVIAFADDLFLLADDDLEIPLMLHMLEEYLTQQGLRINARKCVSISAATIAGKSVVRSKSHYRISESLIPCVGNMNSFKYMGHQFSEKGMMPYNLGNLRTWLERVLKAPLKPHQKMCLLKDHVIPKVLHGLSSPATTGDKLREADRLIRRFVKRALHLQIHTANHLIHARIRDGGLGVLELRKTIPEVSLRRCRGIANATSDPVLASFTSSDHFLKLVNKLEKLAGTVPSTEANRSLIITSPSSSGLEAAADDPASRQWLQSLPQGWTGRDFVRAVHLRTGNLPTRDHHSNPPELRKCRDGCEENESLRHILQLCPRVQAHRIRRHNEIASKVANAMRRKWTVEWEPHVKHEDRKLYKPDMAIHLPDQLVIVDVQVAWEWKENSLAVAWDAKRNKYTTPHFMEAAARRWPGRRVTTLPVILGARGIWPSCNRTTVNTLNLSSALRRSCVESCLKWGSTIHKQFMASVFSQSTRSRPQGLSSRDAG

SEQ ID NO: 233 - protein, 1174 aa, synthetic construct
  source 1..1174: note = MG140-89 retrotransposition protein
MNSTPKSLASDERLCAIDLVPASEGSIGCNGARPSRSTDNEPGLSQDYILEIPFTQRACAYCITSGEGTFMALSLADEDRHAREKHAERTRVYKCTQCNKTYKTRRGGENHVAKCTGPPSPRANALLCNECGASFNNQLGLSQHQRHAHPATRNELRVAEFAPKERKSSGGPVFSSEDVELMLELEVRFREQRYIAKLMSEFLPGRTLAQIRNKRREAAYKRRLFESSAIEIDEADVTDEASSECLPSSTSHDDQDFPEVFGNSPNNNADPSPPEQPWREGIINSALSYMPVKQTPAGSETIITLLKEALAHCKANQGIITQEYTDRVYNEVLAHFMPKAGKETGSETKRKRTKGNGGRLARRKYIYARTQELYKKNPSLVAKMVREGKTHLDEQKCSVEMTEVKELYDSLWGTEPKTNKALWCDGGEDNHVSHRVPLEEAIPYITTSEVAKQIARTRTGVAPGPDGLKKGQLNHGSHPYILHLLFNLIATSGQQPTEWRKNRTTLIPKDGKDGSKAENYRPLTISSLLSRLYWGIIDSKLRVVTKFSTRQKGFVSEAGCFNNVHIFNELLRHSKANQGMVATILDVSKAFDTVPHSAIGPALKKLGLDEWVVRLVEDGYANVQTEISHNDGPININLKRGVKQGDPLSPFLFNAVLDSLLHKLENCPGYKITETEQISVLAFADDLILVSTDVRQAKILLAKTEAYLNSLDMKLAAAKCSAFRIQKHKDTWSLTNPELRLKGGDIPFANADLNITYLGAKISPWKGINIEGLESSFISCLHRTMKLKLKPAQKVALITTYHIPHYLYPLTLAIPSQNVLRRLDQALRNTIKQIYHLPQSTANGLLYCGKKDGGLGIPRLEVVARAATLKTGLRFGASADPVMRALFDNGLSSQLKTVAQASRLPWPVTIKEVDTFKLRARKRELAEWSTLKSQGKSVRSLTDDPIGNAWLTDTSLLKPCRMVTALKMRSNVTAARVSLNRAIPQSDLNCRKCGTKLETLGHILGECTHTKPQRIRRHDEIVDFITNEITKRDKKAAVTKEPSIALPTGGNLKPDLVTENRGRVYVVDVSVRHEDKDYLARGRKDKINKYQKLLPDLQSRFGATAGEVLPILVGTRGAMPKETLDALKKLGITDRKSLLTISLIAHRCSIEIYHQFMDYDAHSKRNGAEEGRRP

SEQ ID NO: 234 - protein, 1339 aa, synthetic construct
  source 1..1339: note = MG140-90 retrotransposition protein
MGKLVYKTTMHHPVPRGGAGAHDDGVTCDRCGKVCKSRGGLKLHRRACLTGGVSGLSSAQAPAGGVVSPDRTSLGKGSSRNGSASGLSSARSPTTDVSRTISAREGRDEGGNSIVGGLRADALECRVVVERLATTRPPATVSDSVAATIVGGNRADALECREAVDPVPASRPPDSEVASAVLQVESDGLLAAGGPPSDASSPEESRAGVRSRPGVLCGSCGRSFGDKRGLSQHERVAHPADYHSRLAIGHRTGSKRRWTYEEKVLVARAEVSLSGTESLNAKLSLAFPERTFDAIKSLRRNPAYRALVHEIRSEGAGGADGSATASAASDPSGGAGASGVTPECSAQGAPGVPASQEEAIRELADACRADSDALCLSPEELGELIALVDSSVRDPSGPSGQRVQALVDKEYDQWVKSLPIPQPKASQSVPEHSGASSCRGRRRRPRGARPTPGSPGVRTLSKRQQRRRLYGIVQELYRKNRTRCAKTVLSGDWAKEKRTTSLEEQDSYWRPLFEEPSKADSRDPRPVSRALFEISQPVTATEYGLVLKSTHESSPGLDRVDRKVLRGIGPRIGVAHMNLWLLACRPPGAFKVGVTVPLPKSADAADPAEFRPITMATMVCRLFHRLLAHRAERHLPLGARQKAFREGDGLADNVWILRSLIEDCKARHRPLCVTFVDVRKAFDTVSHESVVTAAERIGFPPGLVSYIQCLYTGGVTQLRVGRVLGSPIHPARGVRQGDPLSPLLFCAVMHWVLSQLDARLGLQLAGGVRVNHLAFADDVALMSSCPIAMKRLLCELESGMEMVGLRPNAAKSASLRISVSGKVGKWFCHPEPFLSLAGGPVPAIDIQGSYKYLGIRTGAGRKVGEAVTNKLEEGLEQLSKAPLKPEQRLFFLRVHVLPSLYHETALCKYSKGLLKNLDRESRAAARRWLHLPHDVPQALFHASPDEGGLGLPELLVQVPLMRRARVEKLFQRATEDRDPVLAAVIGMSRELRRERQRWEGGVPCYSRKVTDRTGRGRATAAALHQSCDGCGLSDTREVPAVSRWVTSGTRVASGKSFVDAVHIRAGCLYSKVRASRGRSGAPGAVDLQCEVCPARRETLAHVVQQCPRSAHARDERHNRVAKLLIQKLTASGFQVEAEPAIKTDYGVRRPDVVAYKPGEKAVIIDVTVVADLPGELSNAHDRKSNKYDDPQIRAWVARRSGVSTTAVSLTSLTFNWRGALHGRSAQDMVSLGVSLGTLEVMSLIVLEWGHRAWRESRDATWIRMDQVPYCPASSRSRDETGPHHHTGSSRRRHLAARPPQPVCPRGTGRHGRPVQAGTPGRGRHQPGPAGARGVVPSSR

SEQ ID NO: 235 - protein, 1261 aa, synthetic construct
  source 1..1261: note = MG140-91 retrotransposition protein
MNSIAHTFGGLGPDHRLNRPRPRGPPFGGTDPDHRRNSGGRSIDEHGLEPDTGHGDVTDALQLANSNEIILPVPFDSKSCEACLKQRKGDFILLNLNAAVQHARSHHCGVGVLYACKTCGKTYKTKHAAQCHVPKCSGPATSEGKSVICGLCSQAFKTQRGLSQHERLIHPVERNAKREMAGTGKTGRGLNKGYGKVWQKEEVEIMLRLEKTLKGHPQIAKQMMEHLPGKTSKQIRDKRKEASYKALVEHCVSTPGHSSNPGPLESICSSSDSETEIRPVPTIGHVSETEDEISSDEGQYTRQLSPASPVIGQTSLAQRQLTETTQRPGLLLQAGEGPSPIHNEAASPEHKHTRPQSPIGAGEIPGDEDKAEHEWRNDIIRQAVADTKENSTISSKCRELRSRMISILTDIGEGGPLATQTLIDDVYAQVLEQIESTQATRASKRSRRKGPKTQAGSKRRRKRYRYARTQDLFRKNPNLLARYVREGTPWLENEDSSSPKPEDVKSFYSCLWGAAPNITIPFSVTGFGRKALELGEVFQAITARDINERLKHTRHNTASGPDGIERKHITGLDLREILRIFFNIILVSKIQPKAWNTNRTILIPKQGKDGSRVENYRPLTIGSLICRTYWGIVDRKLREVVSFSPRQKGFVHETGCFNNVHILNETIKAAKQSKGLVAVQLDVAKAFDTVPHAAIEAALRRLGLPTGVRESIMNSYTSLTTTIEYAESRTEVSLKRGVKQGDPLSPFIFNAIVDNLLEPLEQMKGYVIDESHSLSALAFADDLILLATTKDKAQSLLHHTESYLKNLGMRIAAEKCASFEIRCTKDSWYIANPDLCLSNGDKIPNSAADSSLCYLGGHISPWSGLRYNDLVAQLETTLERCRSAHLKPHQKLSLTTTHLIPHFLHKTVLATPPITTVRAMDQTIRNHVKVVLHLPMSTPNGLLYCSKRDGGLGIPKLETIVTSSALKQGITLLNSLDPAIHALLQESKLEQRLESLAKHARLQWPILNLRVIDSHKKRMKTDELKAWGQLRSKGKGVASFADDRNGNAWLYNPNLLKPSRFLTALRLRGGMTSDKVTMNKVVPQLNVKCRKCRACNETLAHILGQCIYTKAQRIRRHDEIRDYVSKKLASMKEVQIIEEALIPTPTGNLKPDLVVVNQGRVHVVDVTVRHEDTGYLDEGHKSKVEKYTPLLEILAEQLKVDRGRVLPLVVGTRGCMPVATIDSLREININDRGSYITISLLALRSSIEIYHTFMDYNALVA

SEQ ID NO: 236 - protein, 1158 aa, synthetic construct
  source 1..1158: note = MG140-92 retrotransposition protein
MGSLNLREDMDNENGNGYDPAHRHRHNRGSEDGNPSEDLDAENGNATDALQRDATTEIILPIPFTSTSCATCLRHRKGDYILLNINAATQHARSHHGGIEVKYSCSKCGKTYKSKHATQCHVPKCTGPPTREANNAICGICKQGFKTQRGLSQHERLVHPAARNEKREQAATSRGSHKTNKGYGKVWRKDEVDTMLRLEKTLQGHPHIAKQMMEHLPGKTAKQIRDKRKEPSYKALTEQYYSETEKPRESTRTSSDSEEEIRPVTRKRYALETEDEYSTDLEQEPRQPDHSPAATGQTSLAHEQPIEEQLPHLMRPACEGPNTSNAETTEQRPASPQSPIRVGGTPGNEDGAEQQWQTDILRQTLAATSEDLPVSSKCKDLHLRLVSLLKEIGDEQQPVTQALIDDIYAQVLAQIETTQTKRTAKFTKRQGPKTQAGRKRKRKRYEYARTQDLFRKDPKLLAKYIREGTPWLEEKDPSSPTPKDVKSFYSTLWGAAPNITIPFAVTGLGRIARDIGEVFQAITTRDINERLKYTRQNTASGPDGIQRKHLTGSDTKEILRILYNIILVSKIQPRAWNTNRTILIPKQGKDGSRVENYRPLTIGSLICRTYWGIIDKKLREVTSFSPRQKGFVREAGCFNNVHILNEIIRAAKKKKGLVAIQLDIAKAFDTVPHKAVEAALKRLGLPMGVRESIMNSYKDLTTAIEYAGSKIEVPLLRGVKQRDPLSPFIFNAIIDPLLEDLEQMKGYMIDESHYLSALAFADDLILLASSKEKALSLLHRTESFLTNLGMRIAAEKCASFEIKTTKDSWYIASPDLSLTNGDKIPSSAADSTLCYLGGHISPWSGLQYEALVAKLETTLERCRSAQLKPHQKLSLTATYLVPHFLYQTTLVTPPVKTLRALDQTIRNHVKVVLHLPMSTPNGLLYCSKRDGGLGIPKMETLAACSALKQGITLLNSLDPTTRALLQETKLEQRLENLAKTMRLPWPILNVRAIDSYKMRMKKDELKAWSLLPTKGRGVTAFADDRNGNAWLYNPYLLKPSRFLTALRLRGGMTSDKVTMNKVVPQTFVRCRDAESSVEDLGTGRGVVLGRAVATLRSRLEDSSCRRDETSSHFFCFRAVRGSGMKANFFKVPPCVVVVPRLPHPRLQPHHSLSSSFIY

SEQ ID NO: 237 - protein, 1207 aa, synthetic construct
  source 1..1207: note = MG140-93 retrotransposition protein
MDTERGDVPDALQNADKHEIILTVPFDSKSCGTCLNQGKGDFILLNLNAALQHAKSHHCGVGVTYACKTCGKTYKTKHAAQCHVPKCSGPLTAEGKTVICGLCRQAFKTQRGLSQHERLIHPVERNAKREMAETGKSGRGLSKGYGKVWQKEEVETMLRLEKSLKGHPQIAKQMMEHLPGKTAKQIRDKRKEASYKALVEHCPPTPRPEPLESICSSSDSEPEIRIVPTIGHVSESEDEISSDEGQCTRKLSPKSPAICQSRLAQRQLTETTQPGLSLLAGESPSPRHIETVSPERMHTRPQSTIGAGESPGDEDKAEHEWRVEIVRQAVAETKENSTLAKKCRDLHLRMISILTDIGEGGPLATQTLIDDVYAQVLEQIESTQTTRASKRSRRKGPNTQAGSKRRRKRYRYARTQDLFRKNPNLLARYVREGTPWLESEDSSSPKPEEVKSFYSSLWGAAPNIQIPFSVTGFGRKALELGEVFQAITVRDINERLKHTRHNTASGPDGIQRKHITGLDMREILRILFNIIMVSKIQPKAWNTNRTILIPKQGKDGSRVENYRPLTIGSLICRMYWGIVDKKLREVVSFSPRQKGFVHETGCFNNVHILNETIKAAKQSKGLVAIQLDVAKAFDTVPHAAIEAALERLGLPNGVRESIMNSYGSLSTTIEFAGSKTEVSLKRGVKQGDPLSPFIFNAIVDPLLEQLEQMKGYVIDESHSLSALAFADDLILLATTKDKAQNLLHHTESYLNDLGMRIAAEKCASFEIRSTKDSWYIANPDLCLSNGDKIPNSAADSSLCYLGGHISPWSGLRYNDLVAQLETTLERCRSAQLKPHQKLSLTTTHLIPHFLHKTVLATPPITTIRAMDQTIRNHVKVVLHLPMSTPNGLLYCSKRDGGLGIPKLETIVTSSALKQGITLLNSLDPAIHALLKESKLEQRLEGLAKHARLQWPILNFRVIDSHKKRMKTEELKAWSQLRSKGKGVASFADDRNGNAWLYNPNLLKPSRFLTALRLRGGMTSDKVTMNKLVPQSNVKCRKCRACNETLAHILGQCVYTKSQRIRRHDEIRDYVSKKLASMKEVQIIEEALIPTPTGNLKPDLVVVNQGRVHVVDVTVRHEDTGYLDEGHKSKVGKYTPLLEILAEQLKVERGRVLPLVVGTRGCMPEATLDSLREININDRGSYITISLLALRHSIEIYHTFMDYNAPVA

SEQ ID NO: 238 - protein, 1261 aa, synthetic construct
  source 1..1261: note = MG140-94 retrotransposition protein
MNSIAHTFGGLGPDHRLNRPRPRGPLFGGTDPDHRRNSGGRSIDEHGLELDTEHRDATDALQLTNRNEIILPVPFDSKSCEACLKQRKGDFILLNLNAAVQHARSHHCGVGVWYACKTCGKTYKTKHAAQCHVPKCSGPATSEGKSVICGLCSQAFKTQRGLSQHERLIHPVERNAKREMAGTGKTGRGLSKGYGKVWQKEEVEIMLRLEKTLKGHPQIAKQMMEHLPGKTSKQIRDKRKEASYKALVEHCVSTPGHSSNPGPLESICSSSDSETEIRPVPTIGHVSETEDETSCDEGQYTRQLSPASPAIGQSSLAQRQLTETTQRPGLLLQAGEGPSPIHNEAASPEHKHTRPQSPIGAGEIPGDEDKAEHEWRNDIIRQAVADTKENSTLSRKCRELRSRMISILTDIGEGGPLATQTLIDDVYAQVLEQIESTQATRASKRSRRKGPKTQAGSKRRRKRYRYARTQDLFRKNPNLLARYVREGTPWLENEDSSSPKPEDVKSFYSCLWGAAPNITIPFSVTGFGRKALELGEVFQAITARDINERLKHTRHNTASGPDGIERKHITGLDLREILRIFFNIILVSKIQPKAWNTNRTILIPKQGKDGSRVENYRPLTIGSLICRTYWGIVDRKLREVVSFSPRQKGFVHETGCFNNVHILNETIKAAKQSKGLVAVQLDVAKAFDTVPHAAIEAALRRLGLPTGVRESIMNSYTSLTTTIEYAESRTEVSLKRGVKQGDPLSPFIFNAIVDPLLEQLEQMKGYVIDESHSLSALAFADDLILLATTKDKAQSLLHHTESYLKNLGMRIAAEKCASFEIRCTKDSWYIANPDLCLSNGDKIPNSAADSSLCYLGGHISPWSGLRYNDLVAQLETTLERCRSAHLKPHQKLSLTTTHLIPHFLHKTVLATPPITTVRAMDQTIRNHVKVVLHLPMSTPNGLLYCSKRDGGLGIPKLETIVTSSALKQGITLLNSLDPAIHALLQESKLEQRLESLAKHARLQWPILNFRVIDSHKKRMKTDELKAWGQLRSKGKGVASFADDRNGNAWLYNPNLLKPSRFLTALRLRGGMTSDKVTMNKVVPQLNVKCRKCRACNETLAHILGQCIYTKAQRIRRHDEIRDYVSKKLASMKEVQIIEEALIPTPTGNLKPDLVVVNQGRVHVVDVTVRHEDTGYLDEGHKSKVEKYTPLLEILAEQLKVDRGRVLPLVVGTRGCMPVATIDSLREININDRGSYITISLLALRSSIEIYHTFMDYNALVA

SEQ ID NO: 239 - protein, 1272 aa, synthetic construct
  source 1..1272: note = MG140-95 retrotransposition protein
MDNFDPAIPTDNDMNFDGISPAHRRRLRPHRAFDGNSPVHRRRLRPNRGPLPDDLSEDVDNAYRDATDALLSRATMEIILPLPFTSRSCESCLHQGKGDFILLNLNAALQHARSHHCGVRVLYSCNTCGKTYKGKHAAHCHVPKCRGPPAGQDKTVICGICNEAFKTQRGLSQHERLKHPVERNEKRERAMTDRPSQRPNRGYGKVWQKEELDTMIRLEKLLRGHPNIAMQMKEHFPNKTLKQIRDKRREPTYRALAELYDASQGHSATPELLEVICPSSDSETESRPVHTGLHISETEDEDTSDQGQFSRRLSPSSSRSGQASLAHRHLTEFERLPGLERPADDGLPPRREDADDREQQVNITPSKESGATDDLGSATMTEQEWRTGIIRQTLAEAPDGSTLSSKCRDLHSRLVSILTDISDGQLLATQALVDDVYARVLAQIESSQTTHASKRSRTRGPKTQSGRKRKWKRYRYARTQDLFRKNPNLLARYIREGTPWLEDEDSSSLKQEDIKSFYTSLWGTTRNISVPFSVTGSGRIARNIGEVFQAITARDIKERLTHTRHNTASGPDGIQRKHITGQDIKELLRILYNLILVSKIQPTAWNANRTILIPKQGKDGSRVENYRPLTIGSLICRTYWGIVDRMLRELIHFSPRQKGFVHETGCFNNIHILNETIKAGKNRNGLVAVQLDIAKAFDTLPHKAIEAALERLGLPSVARESIMNSYTNLSTNIEYAGLKTEVPLRRGVKQGDPLSPFVFNAIMDPLLDQLEQMKGFVINESHSLSALAFADDLILLSDTKDKAQRLLNHTESYLNALGMRIAAEKCASFEIRPTKDSWYIINPDLSLTNGDKIPNSAADSSLSYLGGHISPWSGLHYKDLVDQLATTLERCRSARLKPHQKLSLTTSHLIPHFLHKTVMATPPISTIRAMDQTIRNHVKVVLHLPMGTPNGLLYCSKRDGGLGIPKLEALATSSALKQGTTLLNSLDPAIHALLQETKLEQRMQSLAKAMRLQWPILNFRVIDAYKKRMKTEELKAWSQLKVKGRGVQSFTEDRYGNAWLYNPNLLKPSRFLTALRMRGGMTSDKVTMNTVVPQSNVKCRKCRTCNETLAHVLGQCIYTKAQRIRRHDEIRDFVTKKLAAMKEGVKIIEEALIPTPTGNLKPDLVVVNQGRVHVVDVTVRHEDTGYLDEGHRSKVEKYTPLVEILAEQLQVERGRVLPLVVGTRGSLPKTTIDSLREININDRGSFITISLLALRNSIEIYHTFMDYNALVA

SEQ ID NO: 240 - protein, 1272 aa, synthetic construct
  source 1..1272: note = MG140-96 retrotransposition protein
MDNFDPAIPTDNDMNFDGISPAHRRRLRPHRAFDGNSPVHRRRLRPNRGPLPDDLSEDVDNAYRDATDALLSRATMEIILPLPFTSRSCESCLHQGKGDFILLNLNAALQHARSHHCGVRVLYSCNTCGKTYKGKHAAHCHVPKCRGPPAGQDKTVICGICNEAFKTQRGLSQHERLKHPVERNEKRERAMTDRPSQRPNRGYGKVWQKEELDTMIRLEKLLRGHPNIAMQMKEHFPNKTLKQIRDKRREPTYRALAELYDASQGHSATPELLEVICPSSDSETESRPVHTGLHISETEDEDTSDQGQFSRRLSPSSSRSGQASLAHRHLTEFERLPGLERPADDGLPPRREDADDREQQVNITPSKESGATDDLGSATMTEQEWRTGIIRQTLAEAPDGSTLSSKCRDLHSRLVSILTDISDGQLLATQALVDDVYARVLAQIESSQTTHASKRSRTRGPKTQSGRKRKWKRYRYARTQDLFRKNPNLLARYIREGTPWLEDEDSSSLKQEDIKSFYTSLWGTTRNISVPFSVTGSGRIARNIGEVFQAITARDIKERLTHTRHNTASGPDGIQRKHITGQDIKELLRILYNLILVSKIQPTAWNANRTILIPKQGKDGSRVENYRPLTIGSLICRTYWGIVDRMLRELIHFSPRQKGFVHETGCFNNIHILNETIKAGKNRNGLVAVQLDIAKAFDTLPHKAIEAALERLGLPSVARESIMNSYTNLSTNIEYAGLKTEVPLRRGVKQGDPLSPFVFNAIMDPLLDQLEQMKGFVINESHSLSALAFADDLILLSDTKDKAQRLLNHTESYLNALGMRIAAEKCASFEIRPTKESWYIINPDLSLTNGDKIPNSAADSSLSYLGGHISPWSGLHYKDLVDQLATTLERCRSARLKPHQKLSLTTSHLIPHFLHKTVMATPPISTIRAMDQTIRNHVKVVLHLPMGTPNGLLYCSKRDGGLGIPKLEALATSSALKQGTTLLNSLDPAIHALLQETKLEQRMQSLAKAMRLQWPILNFRVIDAYKKRMKTEELKAWSQLKVKGRGVQSFTEDRYGNAWLYNPNLLKPSRFLTALRMRGGMTSDKVTMNTVVPQSNVKCRKCRTCNETLAHVLGQCIYTKAQRIRRHDEIRDFVTKKLAAMKEGVKIIEEALIPTPTGNLKPDLVVVNQGRVHVVDVTVRHEDTGYLDEGHRSKVEKYTPLVEILAEQLQVERGRVLPLVVGTRGSLPKTTIDSLREININDRGSFITISLLALRNSIEIYHTFMDYNALVA

SEQ ID NO: 241 - protein, 915 aa, synthetic construct
  source 1..915: note = MG140-97 retrotransposition protein
MDNFDPAIPTDNDMNFDGISPAHRRRLRPHRAFDGNSPVHRRRLRPNRGPLPDDLSEDVDNAYRDATDALLSRATMEIILPLPFTSRSCESCLHQGKGDFILLNLNAALQHARSHHCGVRVLYSCNTCGKTYKGKHAAHCHVPKCRGPPAGQDKTVICGICNEAFKTQRGLSQHERLKHPVERNEKRERAMTDRPSQRPNRGYGKVWQKEELDTMIRLEKLLRGHPNIAMQMKEHFPNKTLKQIRDKRREPTYRALAELYDASQGHSATPELLEVICPSSDSETESRPVHTGLHISETEDEDTSDQGQFSRRLSPSSSRSGQASLAHRHLTEFERLPGLERPADDGLPPRREDADDREQQVNITPSKESGATDDLGSATMTEQEWRTGIIRQTLAEAPNGSTLSSKCRDLHSRLVSILTDISDGQLLATQALVDDVYARVLAQIESSQTTHASKRSRTRGPKTQSGRKRKWKRYRYARTQDLFRKNPNLLARYIREGTPWLEDEDSSSLKQEDIKSFYTSLWGTTRNISVPFSVTGSGRIARNIGEVFQAITARDIKERLTHTRHNTASGPDGIQRKHITGQDIKELLRILYNLILVSKIQPTAWNANRTILIPKQGKDGSRVENYRPLTIGSLICRTYWGIVDRMLRELIHFSPRQKGFVHETGCFNNIHILNETIKAGKNRNGLVAVQLDIAKAFDTLPHKAIEAALERLGLPSVARESIMNSYTNLSTNIEYAGLKTEVPLRRGVKQGDPLSPFVFNAIMDPLLDQLEQMKGFVINESHSLSALAFADDLILLSDTKDKAQRLLNHTESYLNALGMRIAAEKCASFEIRPTKESWYIINPDLCLTNGDKITNSAADSSLSYLGGHISPWSGLHYKDLVDQLATTLERCRSAHLKPHQKLSLTTSHHTADLKE

SEQ ID NO: 242 - protein, 1537 aa, synthetic construct
  source 1..1537: note = MG140-98 retrotransposition protein
MTMNNVEDAPQVTSREAPTPREPHSWVASKGEVVSAYPLRNPWRCPVTGCKHVQVNGGGKSIETHAKSHGKSVGWSCSKCGSEKFKSYLAVACHHGKCGGRVTPKEHEFSCESCNRAFATAQGLGQHIRHAHPELNMDLRRARDGGGKTARSWSEEEVTLLLAEFPRASRKGRVAQLASEWGRSENSVRKAYAWYSAEALSPAPTTDANYDAAARGDQSEPEENRGEEVPPPSSCPEQVREESTGRVEQVEPGRRRGRTGKTANSKTGNAAAPLMQALGLVTLRGEPSEVSKRGGKQESVRSPYLLRSADLGSRSEEVSSGGGFQTLDKWLRPTSERRPLRQETPEHGQEPKQCTDPPNQSPRSMTDGGCSAPDGLERGGEQEERRRGGSESSGTFCGSEMASGGNGDGLPKRGTPCNEDVTLGPSNRGQVGSAVPVDQSTVSPSATAPLRENTPEVVHALVESNPPAQLGGTTETPFSGGDVEAPGSPGTGSPGGGKAQDSDTTVRRGNLEDGDVQVAMPPCGQQRTDGPKSGGEDGEPESEPIPPALGVQRSEGREYRKPEKRRPTEFESMRGMVQWIDDIAMKRRAHLKEVWGLVRTALEAVMENPESTDAYTAVDSATAAVQKALEEQSTGAATARSNPSRPRPRQNEQRRVPVQRQRKHAMRESKKRKEKRQAYRTAQVLFEKDRKLLYQRVQTESLLQPMGKSTCPIPPDTIHAEYKEIFGLNENYQEGCLSHFAKPVVDPDNPAKTAKLNNFQLVSPADVLDAWRALKPKAAPGPDGVRLSEIRKLDPGGEAFAILYTVWHVSKHVPVGIKECRTILLPKGGDPGVLKNWRPITIGSWVLRVYSRIVARNLERGTTLHQQQRGFLAGTNGCFENLWLWQKVMKACKSRKGALGCALLDVAKAFDSVAHKHVLEALERLSVPPHWVEVVKDLYTGVTTRFELGSARTEPITFLRGVKQGDPLSSFLFNACMDPLICELEANGRGPEFKGPQSASPVRINCLAFADDMGLFGDSSQGLQGSLDIADRFYGVTGMAVNASKSQCFLLESKGKTWKLEPFQFTIGGESIPSLGLMDTAKYLGLRCGPYGVKRELVDTVRDAILKLGKAPLKGLQRVALLKEQLLPKVLFALTVSMTRRSQLSRLDKEIRAAVKKWVHLPASVTSALLYLKVRHGGMGLMCLEQLVPRMQAAQLRKLAGGKLREQALALGVNEDAARLTSVKTAAESEQYWLAAYTNCLWQGVGAESFSNSPCSNTEVDPCSTRLDHKTYCHLLKMRTSTTPVNALMHRIRGVNKECRNCHSQPETLAHVLGECEFGAKDFRIVRHNRVVQSLKKMADEAGYLTVLEPTVVLANPADTGQLERLRPDLLVIEEGRSMAKRVQIVDVTVRFEGVYDGKSTLEFAAGQKIAKYDRIRPEVARMFETDPRNVEVLPFVLGSRGAVPSASLTFLKQLVGGGNAARAKGIAKGLSRSVIRSSCVILGIHMAKTRSNSRPTKSNEHSRLKHRSPQHRGSAAVESLCQTSEDVGGCPEGAVV

SEQ ID NO: 243 - protein, 1280 aa, synthetic construct
  source 1..1280: note = MG140-99 retrotransposition protein
MWLAPTSSRISLAPKSKSNLSSQVNNADDEQESGRGGENRADVTSNQAGSTQCYSLYYPFGANGTCRYCHEMLGTSVANIESHLKSHSIQQYEYLCGTCKKSWPSWRSVMAHYSKSNCRHTTPITAIADEVKDSEVSSSIVVRKTEPKAAKNSGKTTKKQSKIVENPSVDPVIAKKTTTSSSSSIRSVVSKDSEHDDDQLHLATASIITSTRTTTAARVNSEETGRIKTTDEKKMFYCQHCAAEGWDTAASLSQHMRRMHLSEYNATIEVPMLKRRWTADETLVLAELEASIPTSEGVHVNQVLAEKFTSRSFEAIKSHRKRQEYRALVEQLRNRCTASFNLEGSTCTYNTNTSSTVDVNPVVNDSNCFDEDSRRIDPHDTQCSKAPSTTTATVRPVNVDDDDCPNIRQYLREQIIEGKVPVCHTMNRAVMHYVNNVPNADPVNEALRGIQETLASVHPPGEDHGGKPNAGSKLQSQRSKRRAQKFAHYQRLFKSDKSKLASEIFDHVDTSAIKPPLSEAHEHFRKIWETEAKDTDAVEQTETIGTDILLAPITREDIAWAIDQTRNDTAVGPDHVSLDQIRAIAKKELWCAFNIWLGQRKIPDLLKINRTALLPKGNEGLENVKNWRPITIASLLIRLYNKILTRRMQSVFHINRKQTGFKPMNGVGQNTSLLHNLLRHARTKRNSIFVCLLDVSKAFDSVPHDSIKRALRRNGCPTGLIDLISDQYENIYTRISYGKESSQEIFLRRGVKQGDPMSSILFNLVIDELFEIIGDRFGYAIDGVGSVNARAFADDIALISGSEIGMQQLLGSTEQFLLARGLELNVKKCVAICLRKAGKAKKSQIADSSVQNPPHFVVNNEPIRLLGVNDQCKYLGIQYTPLGAVDSRVPVSKLKLALASLSKAPLKPQQKVLMLRSYLIPRFIHTFTHTECYPKLMGQQDRLIRRWLKQTLRLPMSVSNEFFYLPIKEGGLGIGMLYDIIGAAKVRLHAMFGKSGDACLQYLVETQGSAMHARWCQAMKISYRPSTVDLNSRKNLVLEESRERFAKTVHGGGSEVFRASPITNQWLSGQTRLLKGSTYIRSIQMRTNTIPTRVTTSRGQDTIKTCRRCGLADETLIHILQTCPITQGMRCRRHNNVCRKVAEKLRSKGFQVFSEQGIPSPGLQTNISRPDLIAKRGDEALVLDITCVYESGSHSLQDAYRRKVSRYESLAETIKQHYQVQKVTFHGLCIGSRGAYDPRHLSTWHSLGFSGSELMLLAVAVMEDSLRTITLFNNANSLRI

SEQ ID NO: 244 - protein, 1268 aa, synthetic construct
  source 1..1268: note = MG140-100 retrotransposition protein
MKSNTKHTSQVNNAGDTQGSAGIRKNSARTSNQVDLTRSYCVYYPLEINSICPDCPQLLGTNMTNIEKHLNSHGVTLLEFRCGVCRKQWPTWRSASLHYSKSSCRLTSTTSLPNITCTQGSLDVMQSQRKSVEKLSTKRSSSTTADDEESEAEESIVKQEKVDKRKSAGSNSTRRKNRSPSVSTKADAKEIDRSAADAKTTVHIGEASDDDGDQSTKESSTATGINVVDPKKTEKGEKYYCKLCAAKGWDTKVGLSQHMRHMHKSEYNASIEVPLKKRRWTQDEMIVLAELELEVTSSQTPCNSITLAKRFPSRTSEAIKLRRQSKEYKELLHQISLKRTAQICEESECTDASSDVDMITTVNGSIVEKDEDEADSRDRSLSTRLGADSTTCPDIRRYIQEKIIRGKVQMCTTMQDALMHYVADVCGSDPVLESLEGIREALTNVQPSQKHRDGKTNAGSKPRSAKAMRKAERYAHHQQLFKKDKTKLASEIFDGVDNSASKPPMSVAYEHYKKIWTVDTKDTGTLKSKASVGNDVLLAPITREEIALAIDNTKSNTAVGPDRLPMKDLKSIAKNELWGAYNIWLGLRRVPDPLKINRTVLLPKGKDSLDNIKNWRPITIASVLIRIYNKILAKRMQSVFHTNSRQTGFKPVNGVGQNVALLHNLLRHARTNKNNLFVSLLDVSKAFDSVPHESIKRALTRNGCPSEFIQIIENQYENSYTALSYTDGDSPLIPLKRGVKQGDPMSPILFNLVIDELFEIIGDRFAYELEGVGKVNARAFADDIALMSGSEVGMQQLLSETEEFLRARGLELNAEKCISIGLRKAGKAKKSQIADSSVKRSPVFTVKDKPLQLLAIDTLCRYLGVQFTPLGAVDSRVPVSALKSALESLKKAPLKPQQKVVLLRAYLIPRFIFAFTHTECYPKLMGQLDRLIRRWLKEILRLPASMCSEFFYLPIKEGGLGVGKLYDIVGIAKIRLHGSFHRANDECLRFLVETQGSAMHSRWCNAMKLSSRPSVTDINVRNVLTLDQSRTRLSETVHGLGSKVFRVSPITNQWLCGQTRVMKGNAYIRAIKMRTNTTPTRVSTSRGRDSIKTCRRCGLADETLSHILQTCPITQGMRCKRHNNVCRKVADKLRSKGFQVFSEQGIPSPGLRTNVSRPDIVAVRGDQALVLDVTCVFESDLGCLQKAYHQKVDRYKPLAETIKQIHKVRVVTFHGLCIGSRGAYDPGHLAIWHTIGFTGVELGMLAIGVIEDSLRTIALFNNANRLGV

SEQ ID NO: 245 - protein, 1276 aa, synthetic construct
  source 1..1276: note = MG140-101 retrotransposition protein
MQLYTSLAVKSTTNHTHQVNNAGCTQESTGIRKNSAKISNQQDLTRSYCVYYPLGTNSICPECPNLLGQSLTNIEKHLNSHGISHLEFGCGICRRQWPSWRSVSMHYSRSNCRLTSTTSTPHITGTQGSPNVSHSQVKSVEKLSSRRSSSTTADDEESEAKEPIVRKKMVEIGSTEENSTGRKEKCTPSVNPRGDASNHIDRSIADASQHAHIGDISEDDGNPNDRERSTATGNIDVDPKKTGERHYCKLCASHGWGNKAGLSQHMRQKHKSEYNASITVPMIKRRWTLDEMVVLAELEATLTSSQGSCSSKDLAEQFPSRTQESIKLRRQLEQYQEVLRQVRLNRATQKGEESNCLGASSSNVHMVTVANDSINNEEDDDSDSRDRSPGTQLGTDSTACPSIQRYVQENIIRGKVKMCTTMQDALMHYVADVCGSDPVSESLEGIREALSSVQPSQKHRDGKTNVGSKPRSAKVMRKAERFAHYQQLFKKDKTKLASEIFDGVDNSAAKPPMSVAYEHYKKIWTVVTKDTGTLRSQASVGKDVLLAPITREEIALAIDHTKSNTAVGPDRLPLMDLKRIAKNELWGAYNIWMGLRRVPDPLKINRTVLLPKGKDNLDNIKNWRPITIASVLIRIYNKILARRMQSVFHTSSKQTGFKPVNGVGQNVALLHNLIRHARTNKRNMFVSLLDVSKAFDSVPHESIKRALTRNGCPSEFIQIIENQYENSYTALSYTDGDSPLIPLNRGVKQGDPMSSILFNLVIDELFEVIGDRFAYELEGVGKVNARAFADDIALVSGTEVGMQQLLSTTEEFLHARGLELNAEKCISIGLRKAGKAKKSQIVDSSVENPPVFTVKDKPLQLLAIDTLCRYLGVQFTPLGAVDPRVPVSALKAALESLKKAPLKPQQKVVMLRAYLIPRFIFAFTHTECYPKLMGQQDRLIRRWLKEILRLPASVCSEFFYLPLKEGGLGIGQFYDIVGIAKVRLHGTFHRANDECLRFLVETQGSAMHSRWCNAMKLSSRPSAVDLQTRNVLTLDQSRARLSETVHGIGSKVFRVSPITNQWLSGQTRIMKGNTYIRAIMMRTNTTPTRVSTSRGRDSIKTCRRCGLADETLSHILQTCPLTQGMRCKRHNNVCRKVADKLRSKGYQVYSEQGMPSPGLQTNISRPDLIAVRGDRALVLDVTCVFESELGCLQRAYHQKVDRYKPLAGTIKQKYSVQDVDFHGLCIGSRGAYDPGHLAVWHTIGFTGVELGTLAVGVIEDSLRTIALFNNANRLGI

SEQ ID NO: 246 - protein, 1173 aa, synthetic construct
  source 1..1173: note = MG140-102 retrotransposition protein
MCVYYPLELNSVCSRCDESLGCEVANIEEHLKSHDIFKYEIKCGVCDKSWPSWRSVTAHYNRSKCRNTTPTISHATTTATTTTTVKEKASDREIDEEETGKRMTTTESLKVTTQEEKEEKKDEGLFYCKLCAAGGWNKQVSLSQHMRHMHAKEYNAAIEVPNIKRRWTKDEVQLLAELEASVPSDDGTSINQILSQRFPSRTFEAIKSQRKKSDYRDLVKRIRERGIIEESTCTDNSSMKIKSSSNFNLNNNPNPIVNDGNCFDIDEVDSNDCHQLNSLPTGSNDVEQYPDIRLYVRTNIMDGRVQLCDKMRLAMIDFVNIDSQNSDAVNMSLEGIHEALKMKKKKASNEDSHEDEKKKKNSLSGKLKNNKTKKKMQKYAHYQQLFKKNKSKLASEIFDSVDTSASKPPISDAYDHFRKVWEIKASDTATVDEIEPRGTNILLAPITREEIACVIEQTKNDTAVGPDELTLESLRCIARRELWCAYNIWIGLRHIPEQLKLNRTALLPKGNEGLEQIKNWRPITIASLLIRLYNKILAKRMQKVFQISHKQTGFKPLNGVGQNTALLHNILKHARANKNNLFVCLLDVSKAFDSVPHDSIKRALKRNGCPKEMIELVGEQYENITTTITYGKECSPAIELKRGVKQGDPMSSILFNLVIDELFEIVGDRFGYEISGVGSVNARAFADDLALISGTEIGMQELLSQTEKFLSCRGLELNVKKCVAICLRKAGKAKKSQIADSSVKNPPSFTVNNEPIRLLGVKEQCKYLGIQYTPLGAVDPRESVSKLRLALTSLLKAPLKPQQKVVMLRTYLIPRFIHTFTYTECYPKLLSQQDRLIRRQLKSILKLPASLSSDFFYLPFKEGGLGIGKLYDIVGFAKIRLYNMFARSGDMCLKYLTETQGSSMHARWCQAMGLSHRPPMTEVNQRKIVVRDEGRDRFIQTVHGSGHEVFKSSPITNQWLSGQTKIMRGSTYIRCIQMRTNTIATRVSTTRGRNSIKTCRRCGLADETLIHILQTCPITQGTRCQRHNNVCRKVAEKLRSKGFQVFSEQGIPSPGLETNISRPDLIAIRGDHGLVLDVTCVFETGKHSLTEAYRRKVTRYESLAETIKVKYRITTVEFHGLCIGSRGAIEPRHLSIWHSIGFSTTELGVLAVSVMEDSLRTITLFNNANKLRL

SEQ ID NO: 247 - protein, 1249 aa, synthetic construct
  source 1..1249: note = MG140-103 retrotransposition protein
MHYSLATKRKHIFPSQVNNADDEQESGRGGGNRAELTSNQQVSSESYCLYYPFEANGTCRYCPEMLGTNATNIEKHLMSHGIQQYEYQCGVCKKSWPSWRSVITHYSKSNCRHNTSITSSTQVTDTEVSSNIVVRKTETTTTTKTKATGRKRKKSEIVDNPSSGAEVAENPAKNSDVSKDTENDDDHLHTASNIDTTSSAVVNSEETGRIKTTDEKKLFYCNHCAAGGWDTSAGLSQHMRHRHMSEYNATIEVPMIKRRWTKDEALVLAELEASIPSSDGTFVNQVLAERFPSRTYEAIKSHRKNQQYKDLVHQIRNRYAATCNLEGSNCTNMSSVVNIDPVVNDSNCLIEDSQTDPHDSTQIAQTMINVDICPNIRQYIRQHIINGKVQLCDTMNQAMLHYVNDVPDADPVNEALQGIQETLAGVHPSGGDQGGKQNAGSKLKSPTAKRKAQKFAHYQRLFKSDKSKLASEIFDSVDTSATKPPLSDAHEHFRKIWETKAKDNGTVQETRTIGTDILLAPITREEIALAIDQTKKDTAVGPDHVSLEHVRGIARRELWCAFNIWLGLRKIPDLLKINRTALLPKGNEGLENIKNWRPITIASLLIRLYNKILTRRMQSVFHISRKQTGFKPINGVGQNTSLLHNLLRHARTKKNNLFVCLLDVSKAFDSVPHGSIKRALKRNGCPTELIDLISDQYENIYTRITYGKESSPEIVINRGVKQGDPMSSILFNLVIDELFEIIGDRFGYEIEGVGSVNARAFADDIALISGSEIGMQQLLLTTEEFLSARGLEINVKKCVGICLRKAGKAKKSQIADSSVHNPPVFMVNNEPIRLLGVNEQCRYLGIHYTPLGAVDPRVSVSKLKLALESLSKAPLKPQQKVLMLRTYLIPRFIHTFTYTECYPKLMGQQDRLIRRWLKHTLRLPPSVSSDFFYLPIKEGGLGIGKLYDIIGAAKVRLHAMFSKSGDTCLQFLVETQGSAMHARWCQAMKLSYRPSAADIASRKNLVIDECRERFSNTVHGGGSEVFRASPMTNQWLTGYTRLLKGNTYIRSIQMRTNTIPTRVSTSRGRDSIKTCRRCGLADETLIHILQTCPITHGMRCQRHNNVCRKVAEKLRSKGFQVFSEQGIPSPGLQTNISRPDLIAKRDDEILVLDVTCVYETSKHSLQDAYRRKVDRYKPLAETIKQLYQVQNVAFHGLCIGSRGAYDPKHLSTWHSLGFSGRELGLLAVGVMEDSLRTITLFNNANGLRI

SEQ ID NO: 248 - protein, 1219 aa, synthetic construct
  source 1..1219: note = MG140-104 retrotransposition protein
MKSKKNSQSQVNNADDEQESGNAGKDRAGVRSKQLDCSQSYCLYYPFEMNSTCQICNDFLGTTSSNIEKHLKSHGIDKYDYKCGACNKSWPSWRSAMTHYSKSNCRLRGTSTTTSKDTHTTTTSAAATAKTTTTMVHTSSQQVTVEVLSQDGEPKADDETSSNVSSQAKEEPKLLYCRLCASGGWTKSVSLSQHMRRMHPTEYNASIEVPTVKRRWTDDETQILAQLEASIPPSDGLFMNQMLASKFPSRTFEAIKSHRKKEDYRALVEQFRTQMSVVSENERSNCIYNDNNEDQLSHVNTNPNPNPNPNTNNNGFDGDDDLPVVQTIATAATTTTTINVEEYPDIRRYLKTHVIDGKVQLCNTMKEALIEYVNNIPHTDPVNKSHSGICEMIKDVPRNPKDPSVKTNDKGRRKGEKSKKKAQQYAHCQRLFRTDKSKLASELFDNVDTTAKKPPLSDAYEHFRQIWETDAFDKGAVEQGNDIGTDILLAPITREDIQLAISQTKSDTAVGPDRISLDQIRSTSKNELWCAFNIWLGSRRIPSTLKINRTALLPKTNEGLENIKNWRPITIASLLIRLYNKILARRMQLVFRTSQKQTGFKPMNGVGQNTSLLHNLLRHARTNKNNLYACLLDVSKAFDSIPHDSIKRALIRNGCPPDFVNLVSDQYNQTYTRITYGSENSKEILLKRGVKQGDPMSSILFNIVIDELFQIIGERFGYEIEGVGSVNARAFADDIALISGTEIGMKELLTITETFLSNRGLEINVKKCVAICLRKAGKMKKSQVADSTVKNPPILTVNNEPIRLLGINEQCKYLGIHYTPLGAVDPKTAVIKLRSSLASLSKAPLKPQQKVLMLRIYLIPRFIHSFTYTECYPKLMGQQDRLVRRWLKQILKLPASISTDFFYLPIKEGGLGIAKFHDVIGTAKLRLHGMLTNSGDVCLRYLVETQSSAMHARWCQTMGLPYRPSSIEVNSRQKILLDESRSRYAQTVHGGGYDVFRVSPITNRWLSGYTKIMRGSTYIRCIQMRTNTIPTRVTTTRGQQTLKTCRRCGLADETLIHILQTCPITQGMRCTRHNNVCRMVADKLCSKGYNVHAEQGIPSPGLQTNISRPDLIAIKNDEALVLDVTCVYETSKSSLHDAYRRKIDRYAPLSDTIKQKFKVNHVSFYGLCVGSRGAYDPKHLSIWHSLGFSGNELMVIALRVMENSLRTIKLFNNANRLCI

SEQ ID NO: 249 - protein, 1247 aa, synthetic construct
  source 1..1247: note = MG140-105 retrotransposition protein
MENRKNSAVTSKQQNQMKSYCLYYPLDANSTCQDCNDLLGVSVANIEKHLNSHNIKKFEYRCGVCDKLWPSWRSVTTHYSKSSCRNQTSTAPSSSTNTMQKFSNSIIDRKESEVTKANSKESGIVTVVDEESETDDEDSSVLQQQTNENIQKHRYSSSVIPKNNRKESDSESNLEEDDGDDENETSESIGTQHSAIGVGLKKTGKIKKTIDKINNKYYCELCAAGGWDKSVSLSQHMRHMHKSEYNASIEVPMKKRRWARDEILILAELEAKIPSTDGIFINQILAKKFPSRTLESIKSRRKTKEYRDLLQQLRDCQAATSPEGLECIYESSIVDSSTVENDSINDKEEEDNENNPDNTIISVLGTDSTTYPNVQQFIKDKIIDGRVPMCTTMADALAHYVNHTMNSDPVEESLKGIREALGNVHSSQPHRDEKRDAGSKFRSVKSKKKAHEFAHYQRLFKKDKSKLASEIFDGVDNSAIKPPMSVAYEHFRKIWEADTKDTGKLENKVSVGADVLLAPITREEIAWAIDNTKNDTAVGPDHVPLKDIRRIARNELWCAYNIWIGSRRVPNELKANRTVLLPKGKDDLGNIKNWRPITIASILLRLYNKILACRMQSVFRTSSKQTGFKPVNGVGQNVAILHNLLRHARANKNNLFVCLLDVSKAFDSVPHESIIRALARNGCPNEFIDLIKNEYENSYTALSCTDGDSPLVYIKRGVKQGDPMSSILFNLVIDELFEIIGDRFGYELQGVGKVNARAFADDIALISGSEQGMQQLLLETEKFLNARGLELNVDKCIGIGLRKAGKVKKSQVADLSVKNPPSFMVKNKPIRLLGINEQCRYLGVQFTPFGAVDPRAPVAKLKLALESLKKAPLKPQQKVLMLRSYLIPRFIFSFTHTECYPKLIGQQDRLIRRWLKEILRLPSSICSEFFYLPIKEGGLGVGKLYDTIGLAKVRLHGSFTRSGDQCLQFLMETQGSSMHSRWCNAMKLSTRPSAIEINQSKVLFIDESRVRLSETVHGSGSELFRNSPITNQWLSGDTRIIKGRTFIKAIQMRTNTIPTLVSTTRGRDTNKTCRRCSLADETLVHILQTCPITQGMRCQRHNNVCRKVSEKLRSKGFQVFQEQGIPSPQLQTNVSRPDLIAIRGDQALVLDVTCVFESNKNSLQDAYRRKVDRYKPLAETIKEKYKVRDVEFHGLCIGSRGAYDPRHLAIWHSIGFSGAELALLAVGVIEDSLRTITLFNNANSLRI

SEQ ID NO: 250 - protein, 946 aa, synthetic construct
  source 1..946: note = MG140-106 retrotransposition protein
MCMDKNWKTRMKGMKLPKNVTPGIKVPWKKSKCALCEQVLSTAKEAMIHLKMVHKAHKILYVCKSCAGAKKSLGQTISHASKCRKPKIGKAQKQKPHNCPICDRGFGSSSGLAIHKLRIHAARMQMDMSNIHGNNRPDYLTDPSSLLELISCPDKIPSNCETPSLGLKALDNFGSVPRVVKRRRDLRSDVCSHPNRGVAAEARNTPTVRPPPRGSKVSPDPSYLGRREDSLALHDSTSLMSGVSGAGDTLTDGLGNTGVKEGAPLGMRSWRDSRTRGSSSHLCGGVPSGRDTPAGFSFPKGLKALPMVPNDGAPSGRSGWRDSRVLPRSHPKREVTGSARDTPTRRSVLEGLKTTLVPSMGCVRKLQIQHDSMPPRGSVSGVGNPRTLVPEGVKPNVVPTSRKRRRDLRAGKNPGHSHGRASDSRNTPTATLVNKGLNAPSMTLSLLRKEDHTKTVSVLPVSNFNEELLFLYKNEDPRGRDLVSEKGKFKKSLRFYTVPGVETRSAKNIKKLLKNLATFKGRNAGRAAVKPKGIWNPPTSLHTRAKYRLAQMYYESSLKELAIGILDDKTKILCPISAKDISTEYKRIWESSDEFKSLGSFSKRPKAVNKLLRGPITPGEVLFTVKAFKPNTAPGPDKLGKNDLLSWDPKARIFNEFLIRGKIPGSLKVSRTVLLPKGSGSFEKNEIKNWRPISIGSVVLKTFMAIISKRLQCACDLHPRQRGFIQSPGCAENLTVLKELMERAKKNKNTLAVVFIDFAKAFDSVSHKHIDEVLKQRNVNMALRKIIKDSYNHCYTKVETSEGATAKIEIKKGAKQGDPLSPLPFCLALDPLVATLDELGDGAEWDNCTGAKVSVMAYADDIILLSDSIKGIKKNMEILSIFSDLTGLRVNPTKCKGLLIVKGFPRIVKEGWTINGEEIEMLGPTGRTKYLGVHVNPWAGLMKPPT

SEQ ID NO: 251 - protein, 1340 aa, synthetic construct
  source 1..1340: note = MG140-107 retrotransposition protein
MKGKKLPNIVSVGIKVPWTRSNCLLCKLDLSTAKEAAIHFKKVHKAKWVLYICKSCAGTKKSLGQTIAHASKCVKPKSKKDIKQKEHSCPICERKFGSAGGLTIHKLRIHASGPEIKTGSVNQTNYLDRIINPYAWSDAEPISNAASAGTDTPILGIKAVPRFGSAPRVEGRRRDSRANIRPHSIRRAAMEARDTPTASPPIRGLKVMLDPPHLGRREDSLTLHDSTPIVGGVSGVGDTLTDGPVGINGNSVTPSGDRCLSLSQVCGDPPQLLGGASGAGDDLDGPYSSAGLKALLSVSVGRAPLEPRRWRDSRALLRSHPIRGVAGGSRDTPVPPPVTRGLKTTMAPSSGYVGKPQTHPDSKFPSSCVSGAVVSHVLSLGDKESLVVPSMRIRGRAPRSQSRPNRHRGRVPGACGVPAGALLSEGSNALPAMSSSGSGGGNGRTVSAPPVSEMNGELSFLYNNVAPNNRGVISEKGMFRKSRRFYITPGVEPRSVMCTRTLLKHLATFKKRNAGGAAVKPKGIWNPPLSIRDRAKYRLTQMYFEQSLNELAIGILDDKSRILCPISPSNIHIEYRKIWESIDEFRGLGSFAKRPRAINKLIRGPITPGEVLTTIKSFKPNTAPGPDKLGKNHLLSWDPKGKKLARIFNEFLVRGKIPESLKLSRTVLLPKGSGSFDQHDSKNWRPISIGSVVLKTLMSILSKRIQGACELHPRQRGFIQSPGCAENLTVLKEIIDRAKRNRDTLAVVFIDFAKAFDSVSHKHIDEVLKRRRVDMVIRKIIKNSYKHCYTRIETSGRTTAKIAIKKGVKQGDPLSPILFCLAIDPLVATLDEMGEGVQWNSSTGEKVSVLAYADDIVLLSDSIKGINKNMEILSIFSNLTGLRVNPKKCKGLLILKGFPCITKDEWKINGEKIEMLGHTGRAKYLGVQVNPKAGLVKPPIREQLNLMLEKISKAPLKPTQRLGILKQHVIPRVIFEADHCMISKTILEDCDRDIRTRVKTWFHLCHSVSNGLLYCRAKDGGLSIPRLKTAVPATQSKRLIGLMKSDDPLIKEMAGSETNRRKVANMIKELTKNPDDPKPENLESFDTVNIDTNHRKDREFETWCKQNHHGRGVAPFKGDKVSNCWCNNPVEERFSQKEFILALKLRSNSIPVRARVGNSFNGDKSCRWCRHGPETMEHALGSCKTWRDVRMKRHNRICCALASLLLRHGWRVDSEKKITLQENGHYGKPDIIATRGSKALVIDVAVPLKGDVLTLRTTAKHKEEKYKIFENAIKGTYTEVKEVTYWGYPISAKGKWYKGNNILLREIGIKSLRSVNSVARCHVKLALWGTINLCKCFFRN

SEQ ID NO: 252 - protein, 1474 aa, synthetic construct
  source 1..1474: note = MG140-108 retrotransposition protein
MGGIYLFQNKLSRTTFVSHTNERFMGLAGTEVTLVYIRYPCLIQVFCCCINRMNSIDKISWSSPRSSLRWSSKLLLRGRLFSGNRDKEKATKTDNSVISTPQRSQRTAIPRKDLFLVKPPIESLFLCINKNWKKLMKGKKLPNIVSVGIRVPWTRSNCLLCKLDLSTAKEAEIHFKKVHKAKWILYICKSCAGTKKSLGQTIAHASKCVKPKTRKDTKQKEYSCPICERKFGSAGGLTIHKLRIHASGPENKTGSINQANYLDRIIDPYAWSDAEPISNTASVGTDTPTLGIKAVHRFGSAPRVEGRRRDSRANIRPHPIRGAAMEARDTPTASPPLRGLKVMLDPPHLGRREDSLTLHDSTPIVGGVSGVGDTLTDGLVGINGNSVTPSGDRCLSLSQVCGDPPQLLGRASGAGDDLDGPYSPAGSKALLSISVGRAPLEPRGWRDSRALLRSHPIQGVARGSRDTPVPPPVTKGLKSTLAPSSGYVGKPQNQPDLELTSSCTSGVVVSHVLSLGDKESFVVPSRGIRRKAPRSQSKPNRHHGRVPGACDVPANALSEGLNALPAKSSSGSGGGNGRTVSAPPVSNMNEELSFLYNDVSPNNRGVVSEKGMFKKSRRFYITPGVEPRSAKCTRTLLKHLTTFAKRNAGGAAVKPKGIWNPPLSIRDRAKYRLTQMYFEQSLNELAIGILDDKSRVLCPISPSDIHIEYKKIWESTDEFKSLGSFAKRPRAINKLIRGPITPGEVLTTIKSFKPNTALGPDKLGKNHLLSWDPKGNKLARIFNEFLVRGKIPESLKISRTVLLPKGSGSFDQHDSKNWRPISIGSVVLKTLMSILSKRIQGACELHPRQRGFIQSPGCAENLTVLKEIIDRAKRNRDTLAVVFIDFAKAFDSVSHKHIDEVLKRRRVDMVIRKIIKNSYKHCYTRIETSGKITAKIAIKKGVKQGDPLSPLLFCLAIDPLVATLDELGEGVQWNSSTGEKVSVLAYADDIVLLSDSIKGINKNMEILSIFSNLTGLKVNPKKCKGLLIIKGFPCVSKDEWKINGERIEMLGHTGRAKYLGVQVNPKVGLIKPPIREQLNSMLDKISKAPLKPTQRLGILKQHVIPRVIFEADHCMISKTILEDCDRDIRTRVKTWFHLCHSVSNGLLYCRAKDGGLSIPRLKTAVPATQSKRLIGLMKSDDPLIKEMAGSEINRKKVANMIKELTRNPDCPKPENVESFDTVNIDTNHRKDREFETWCKQNHHGRGVAPFKGDKVSNCWCNNPVEEGFSQKEFILALKLRSNSIPVRARVGNSFNGDKSCRWCRHGPETMEHALGSCKTWRNVRMKRHNRICCALASLLLRHGWRVDSEKRITLQESGHYGKPDIIATRGSKALVIDVAVPLKGDVLTLRTTAKHKEEKYKIFENAIKGTYTEVKEVTYWGYPISAKGKWYKGNNVLLREIGIKSLRSVNSVARCHVKLTLWGTINLCKCFFRN

SEQ ID NO: 253 - protein, 1365 aa, synthetic construct
  source 1..1365: note = MG140-109 retrotransposition protein
MFSRIIVGNCFKDKPAKFETTTKTTPQRSQRTVVPRKDLFSVNPKNECLFLCIYKKWEDKMKGKKLPGYVTVGIKIPWVVSECILCKVSLASAKAAAVHFKKVHKARKLIYICKNCSVTKENLGQTISHAPKCKMPKKRAPGPGPCVCSICERSFGSVRGLSLHKLRAHITRRKPSAIDEKSKLTPILGIAPLVGGTRRDLRVVVRSHPYGGVTSGARNTPTMSLSAGGLKVIPGPSLLGRREDSPSLHDSTLVISGVSGGGDTLTDGSRGTQAPGMAPSRERRRRDLRVHRSWIHRCGETLGTRNTPAESFSPDGKKALSLVLSGGVPRMVTDREDSRVIVCPYPHGGVAVVARDTPPFGITVQGPKVTLDFPPEPVEKWTQHDSTPNQSGVSGAHDFTTEVLGGVNKSCVAPSGGTNYRDSRSYEHPQHVYGGGRGDRDTPMVAPPLEGLKATPATLPLDQYGDSSTRTDNALPIPGVQNNLLFLYDEKVPHSGEKKQLAKWRESLRFYTTDNVEPKSSNCVRVLLQKLQAFKERRKRGAVRKPKGIWNPSPSISARAKYRLTQMYFEYSLKELAIGILDNAERMLCPIPIKVIWKEYKKIWEAQDMFKTLGNFATRPEAKNLLLRGPITPEEVIGTVKAFKPNTSPGPDKLGKVDLLAWDPRGMKLTHVFNYFLTCGKIPKSLKLSRTVLLPKGSELFNKSEIKNWRPISIGSVVLKTFMAILSKRLQDACELHPRQRGFIQSPGCAENLTILKELIERAKRNRNTLAVVFIDFAKAFDSVSHKHIDEVLKQRRVDAVIRRVIMDSYKHCYTTVEAAEGSTEKVQIKKGVKQGDPLSPLLFCLALDPLIATMEELGEGYTWDENLGHKVAVMAYADDIVLLSDSVKGITKNLAILSIFSDITGLRVNPAKCKGFLIKKGYPCIVNEKWKISGDEMEMLGPTGKVKYLGVQVNPWTGFVKPPIRESLKEMLEKISKAPLKPTQRLDILKTHVIPRILYNADHCMVSKTVLDDCDRDIRTQVKAWFHLSPAVSNGLLYSRAKDGGLGVARLAALVPATQSKRLIGLMKADDLLIKKMAGSDTNRKKVTNMLRRLTCNSEYPSNGDLETFDLKKVGPDKRKDSEFQAWCRQRHHARDVVNFKGDNISNCWCSNPVKEGFSQKEFILALKLRSNSIPVRARVSDSSAGDKTCRWCCMGPETLEHILGGCKVWKKTRMKRHNRICNALVVLLSRHGWRVDTERKITIQENGKIGRPDIIAVKDKRALVLDVAIPLKGDDETLESMAGKKVEKYEVFDKVIKDMYKDITDVTYWGYPISAKGKWFKKNAALLRAVGVKSTRTIKCIARCHVKLALWGTINLCKGFFRK

SEQ ID NO: 254 - protein, 1034 aa, synthetic construct
  source 1..1034: note = MG140-110 retrotransposition protein
MVFFSIEKDWRSRVNTGALPPDVSVGLKVPWPTQDCSLCPVTIPTAGTAMKHMKIRHRASKVSFICARCSGISPSFRQVVTHAPKCGLHKQYKSATINLFRCEHCTKSFTTKRGLSLHRRRAHLAVYLSSIDSQPAVSTPPGMPNLEDLQLLGNMLPPVEACSGAAVALMKAFGEEKFLPFSPWKMTPRQINIMTGRVVATLKRRNPRLAGGVAAFKLKRLSYPVSSSSRYRLTQIRMESAISGLAKSILDVAPRVPCPVSPEEVLIEYKGIWGASDSFKGLGQFGDCPQADNSVFHTPFLPDEVLTIINRMRPETASGPDGLGKNDLLRWDPRGTKLVKLMNTILFSGSVPNILKRSWTALIPKGGPSFNPTNLKCWRPITIGSVLLKIFSGALTRRLEAACPLHPRQRGFIKAPGCAENLLVMRGLMSASKRHALTLAVIFIDLTKAFDSVSHSHIAAVLERREVDILIRRLIADLYRGCFSTIRTGGGFTPWIRLRAGVKQGDPMSPLLFNLALDPLIRKLESLGTGFSLPGGQSLTSMAYADDLVLLSDSWGGMERNIRILETFLDLTSLKVNHKKCNGFIMEKGRPRFDDKAWKISGLPINMMGPAGAATYLGVEVNPWRGFLKPDINGVISKMLQRISGSAVKPTQKLRILRGFALPRVLYVADHCLVSKSVLMECDRLVRTAVRAWLHLHPTVANGLLYCSNNDGGLGLQRLSTLVPSIQIRRQIRMLRSDDEITQAVAMISINKKMLVQSIEALLGEPDSLNPVSLDEFDLKLISSKALKALEHEKWCHHLSHGRYARHFRNDKISNCWIRDPVKSGFTQADFIVSLKLRSHSLLHGGPLAQGTQAPPCGMCNSEFNTLGHILSCCPAWRPQRMQRHNNVCTALIFALLWKGWSVDREQRICLIRTKEQWVPDIIAKKGDCALIIDVAIPLSGSLESLKQAANEKVLKYKKLERLVKGSYKVETVSTWGFTIGALGKWYPRNKELLKKCGIISAKTIKGIARRCVKLALWGSINICKVAFREANMC

SEQ ID NO: 255 - protein, 1095 aa, synthetic construct
  source 1..1095: note = MG140-111 retrotransposition protein
MAGLIRLGTIKNLKSRLLITPNFDTPSHPKKQGDPATPLRGRMRRIPRRRLFSKRTDPGMLFFCVNKKWRSNFKNKMLPSEVMVGLRIPWMNQKCKLCPARISSLREAMRHMRMCHKAKKLIFLCFTCAGYRCSMRQSIAHASKCKKSYETITSPKGNFNCSHCSKTFKSQRGLSQHRRRMHLSTYLNSPTRDQEAHTPMSGDSGVIINALSGTTIPQMDVVSGLKTSLMMAMKKDEFKHVAPKRMSYGSLSKKVSRMIISIQELNGIIPRGATTKNPFNRGTSSGRAKAKFRRTQNHFASSMKDLASEILDGAIRLPCGIPKDTIWRAYKDIWETPDKFVGLGAFGSCPKADNSQFELPILPEDVLMILKAMKPKSAPGPDGIGKLDILRWDPTGIKLAKLFNTMLLKGKIPSSLKKSRTVLIPKGGPSFDESLLIHWRPITLSSVILKTFSGLITKRLSEACKLHPRQRGFIQTPGCAENISTLNGLILKAKKDKRSLAVVFIDFAKAFDSVSHTHIDSVLRQRGVDRLIRGLVKNSYKRCYSAVQTSEGLTPEIALNRGVKQGDPMSPILFDLALDPLISSLELHGMGISITSDVSITTMAYADDLVLLSDSHGGMSYNISILEKFSRDTGLEINPSKCMGFMIKNGRAILNFDKWKIFGHDVENASPTRHAKYLGVQFNPWKGIVKPQIKSQVKEMLRKISEAPLKPTQKLDILRSYAIPRIVYVADHSMIPKSSLDECDREIRTCVRSWFHLHPSVVNGLLYCAYEDGGLGIQRLGTTIPAIQARRQIKLLSSEDPVTRSVTEATVNMDSISKSIRRLCGVVCAPSLRSLRMFDLEKISAKAMKTFEFQHWCKAGIHGKEAGPLRKDKISNCWLRSPISEGFTQSDFILSLKIRSNSIPVKASVMTGKTPNTICRGCLSHPETLDHVLNVCKTWKLKRMKRHNRICNLLSSVLRSLGWKVDQERRIYLDDGRQGVPDLVAVKNNTAVIIDVTVPLNNDDKTLSKCDRAKICKYSPFTIAIERKYPEVTSVTVWGFPVSAKGKWYTPNAKLLTHIGIKSKQRMKSIARCCVKLALWGSVNICKEFLKIKNM

SEQ ID NO: 256 - protein, 1260 aa, synthetic construct
  source 1..1260: note = MG140-112 retrotransposition protein
MEKSNLYFYTGLALDRVNNAPAVGFDAPADSVKYIRGVIRVAGPMDKMVWTIMKSHENESENQVLPVEHGEEVEENVCDDHGEEILSILPMVFTRDTFNDLTMDSFNPDFKYLSTFDDPYVRESGYLNAHLVNGSSLLNSFRPSTDFNRDRNKDLNSTGSNINILESSSWKDGFFYLEYPVDSFNCPICPQILPTFGKWAKHINVVHKSKAIRVVCSKCGKSSQYHNIACHYPKCIPKKVDTPMKSHTCSVCGLGFHTRSGLSQHCRHRHPAVRNEQRKEDMAAKSKIKEGSTRSRIWTKDEVAQLIQLERKYIGKRNINKCIESEMRTKTNKQISDKRRELAKKKLVVTGDREEVTEVEDIRVNILEIPPPRERIFPLKGHPEVDLVEKICKRGKQSREGREIINSLGEIEGLLKEDLTKALGWAMLEKLCYSLVEGKDPRNESQIELRNKGKGKMRKEGRRKQFNAIRRYATKKAKYKFYQQLFDKDRRRLTRIIMGEPDKAKCAIPMKEIEEYYVNILGTIGHGNMIGWPSTTENADNDILMSPISVDEIRIALREIRKDSAPGPDKVKVSNLWDIFNLDSLILTKIFNIWFLNRQVPDEFKKNRTILIPKTQDEEEMKKLTSWRPLTIGSVWIRIYTKILAKRLVETVKICSRQKGFISAPGCEENIAILDNLIKGAKRNGNEIAIVFVDLAKAFDSVGHGHIIAGLRRFGIDEHFIDIIRDLYDNCTTRVWVGDEATESILIRRGVKQGDPLSPILFNIAMDPLLTRLEVEGSGFYVKGNSVTSLAFADDVAILSSSYKGMIKNLGILEEFCKNTNLSVNVKKTKGFHILTKHKTYVINPKDNWQIESEEIEYVQPGDFEKYLGARIDPWIGVGGPVLKEKLKDWSENLIKAPLKPAQKILILQTYILPKLFYNLLLIEPPFNLLDDLDVLVRKIVKEILHLPQCTTDGIFYSRGRDGGLALTKFSVQIPNMLIRKWRRHIVSRDDWMDLSYLYAGENLVDKILSFSAVTSHPKKWREEEFLRWSELRCQGIGIKYFKNDLISNSIFRNSSKVKSSAYIAALQLRANIYPTRETLARGRGGVNALCRWCGKVRETVPHISGQCYKTKNARIKRHNRVVSAVVDKVGKLGWKAMIEPHLRNSKGELRKPDIIFIKGDTAVVVDVTVRWEDNAGSLEQAHSEKVAYYLELEEEIKNLTGGKNIHFFGFVLGARGKWSEGNNDLLQLLGMDRSKNFKESICRLVLYSTIGMMAIFSDR

SEQ ID NO: 257 - protein, 1260 aa, synthetic construct
  source 1..1260: note = MG140-113 retrotransposition protein
MEKSNLYFYTGLALDRVNNAPAVGFDAPADSVKYIRGVIRVAGPMDKMVWTIMKSHEHESENQVLPVEHGEEVEENVCDDHGEEILSILPMVFTRDTFNDLTMDSFNPDFKYLSTFDDPYVRESGYLNAHLVNGSSLLNSFRPSTDFNRDRNKDLNSTGSNINILESSSWKDGVFYLEYPVDSFNCPICPQILPTFGKWAKHINVVHKSKAIRVVCSKCGKSSQYHNIACHYPKCIPKKADTPMKSHTCSVCGLGFHTRSGLSQHCRHRHPAVRYEQRKEDMAAKSKIKEGSTRSRIWTKDEVAQLIQLERKYIGKRNINKCIESEMRTKTNKQISDKRRELAKKKLVVTGDREEVTEVEDIRVNILEIPPPRERIFPLKGYPEVDLVEKICKRGKQSREGREIINSLGEIEGLLKEDLTKALGWAMLEKLCYSLVEGKDPRNESQIELRNKGKGKMRKEGRRKQFNAIRRYATKKAKYKFYQQLFDKDRRRLTRIIMGEPDKAKCAIPMKEIEEYYVNILGTIGHGNMIGWPSSTENVDNDILMSPISVDQIRIALREIRKDSAPGPDKVKVSNLWDIFNLDSLILTKIFNIWFLNRQVPDEFKKNRTILIPKTQDEEEMKKLTSWRPLTIGSVWIRIYTKILAKRLVETVKICSRQKGFISAPGCEENIAILDNLIKGAKRNGNEIAIVFVDLAKAFDSVGHGHIIAGLRRFGIDEHFIDIIRDLYDNCTTRVWVGDEATESILIRRGVKQGDLLSPILFNIAMDPLLTRLEVEGSGFYVKGNSVTSLAFADDVAILSSSYKGMIKNLGILEEFCKNTNLSVNVKKTKGFHILTKHKTYVVNPKDNWQIGSEEIEYVQPGDFEKYLGARIDPWIGVGGPVLKEKLKDWSENLIKAPLKPAPKILILQTYILPKLFYNLLLIEPPFNLLDDLDVLVRKIVKEILHLPQCTTDGIFYSRGRDGGLALTKFSVQIPNMLIRKWRRHIVSRDDWMDLSYLYAGENLVDKILSFSAVTSHPKKWREEEFLRWSELRCQGIGIKYFKNDLISNSIFRNSSKVKSSAYIAALQLRANIYPTRETLARGRGGVNALCRWCGKVRETVPHISGQCYKTKNARIKRHNRVVSAVVDKVGKLGWKAMIEPHLRNSKGELRKPDIIFIKGDTAVVVDVIVRWEDNAGSLEQAHSEKVAYYLELEEEIKNLTGGKNIHFFGFVLGARGKWSEGNNDLLQLLGMDRSKNFKESICRLVLYSTIGMMAIFSDR

SEQ ID NO: 258 - protein, 1155 aa, synthetic construct
  source 1..1155: note = MG140-114 retrotransposition protein
MSKPTGRLLNRRWSPRGDQTPGTPRGPRFLARVKRALFTPSKDKAGMTFLCANKTWRQNMSQGRLPKMVKVGLRVPWASQSCRLCDIELGSLREARTHLIRIHRPWKVFYRCSRCAGTFAHLPSVVCHVPKCTPRQTTTPADPGHYRCDLCTKVFSSSRGYSNHRRSKHTAAYLREKQGSQLKERNGNSHWSKEDTASPRQMIDEEGNSPGLYAKAAARFPTMTPRQIREKCRLIRASAKTSVVKSPTTHNANQDLRDLEVELPPQPSVAVLKEALEAQLTGGEGDEGLDPLHCSGRDLNRYVRKVIRLLCRQTPKVLGGKIKRTSPGNPKRLKQSKRFRYKIMQTRYRRDRPTLARWILDGKEKSECPISRAEVASGYKRIWEAGDSFKGLGGFAAMPPADNSPLCVPISAEEALRAVRRMDPKGAPGPDGLRRSDLLRWDNKGRKLANLFNTILHKGKLPSCLKRSRTTLIPKSSDSAKLADLSQWRPITIGSVMLRAFSGILARRLKEACPVHTRQRGFIESPGCSENLLLMDGLLRIAKKEVRPLAVVFVDFAKAFDSVSHQHIAEVLTRKGVDEWMRKLIQDSYKGCTTVVRTKHGETDRIHIKVGVKQGDPLSPLLFNLALDPLLYVLENKGVGFRVGGRSLTALAFADDLVLLSDSWKGMERNLQILEIFSSLTGLKVNPSKCHGFMLDKSQRRYTINDCEVWKLAGTPIHMVPGHEAVTYLGVQISPAKGILTPPLRTLVKDMVARITRAELKPSQKVEILRTYALPRLIYMADHGMACGSLLDGCDRDIRSAVKGWLHLEPHTTDGVCYASFQDGGLGLIKLAAHIPTVQLRRIMAMYNSTDECTKSVARATLPVSNIWALWNRVRGIKRSGDHSRPDLNAIDLKEASTAAWRGREFGRWCKLKTQGVGIEVFRADKISNSWLREPTGARFHESEMIMGLQLRTCTFPTLSSRARGRGRAHDALLCRLCGRQQETIRHIIGNCVSVKPNRMANHNKICGFLQRVAEEAGWLVARERRLVSDSGSVGVPDLVMVKGREAIILDVAICFEANQDTLYDSEVRKIKKYSGFTMAVKTIHPDVRNVSVCGFPMGARGKWHKNNTAILTKLGVSKKRAKQLAVVMSRRALLQTVDMCKVFRALARRQRVPR

SEQ ID NO: 259 - protein, 1180 aa, synthetic construct
  source 1..1180: note = MG140-115 retrotransposition protein
MFSTPRRRLSRPRVVRSADGDSDQTVVGTVTSRGIRGRFLFTKDKDGGSPGTPRKAGVRMIAGKRLFPRLKNPSVIFMSWDKAWLSKLKNKILPSSVIVGLRVPWIVQDCPMCRISLGAVRETLQHMKKTHKARTTLMVCRVCATTFKTPHKAVCHAAKCGLAGSKAKAPSAHACDLCTRSFSSKRGLSLHQRVKHLDTYLRRLNAVPPAKTPRSVWSASDISTLISIQRNTPRGSGFVKDVAAALPHLTENQIRNKWRQIKSQAQQEEAVAPAAELEEFLGKLGTEMALEETVSVAKAHLRKKIVPNSKMGMSFLRRSVVSLNNFLWKLVRSWRGRKLTPLAGRKVRLSGLSSQFKNPAKRMSFKYVQTTYYSDRKAVAQFILDGRERSLCGIDPQAVTRTYMGIWEKEDEYVGLGQFARLPKADNIPFLFPITPDETLRTVRRMDQNKAAGPDGVRRNNLLVWDKKGEKLADLFNAMLLSGRIPSCLKQSRTTLIPKSSDPTKANEINQWRPITVGSVILKAFSRILTLRLEDACPIHPRQRGFTEAPGCSENLIILENLIKLHKSKKKSLAVLFIDLSKAFDTVSHRHIGDVLRARGVDKLIRRIIRDSYAGCTTKIVTAGGLTRAINLKVGVKQGDPMSPLLFNLALDPLLHTLENAGSGAEVEGRNLTALAFADDLVILSNSWDGMNRNLGILGRFSDLTGLKVNPGKCHGFLIGKGAAKRYTLIGCQPWVLGGEPIHMVGTQESVRYLGVQIHPLKGILVPPIRESIRDMADKISLAALKPSQKVDLFKTFALPRITYVADHGNANISLLRECDRDIRTVVKKWLHVEPFTTDGVLYSRCKDGGLGISRLASSIPAIQLKRLLSLYNSTDECTQAISRAVFPQKRLTQLWKYVWPEKVALGQKCDLDLGNNAGCKIDSRAWRQAEFERWCRLTLQGMGVAVFKNDKISNKWVLETRTGGLTESEIIMAIQLRTNTLPTLSVLRRGTAQGDRLDCRLCGVGKETPFHVVSCCNKLKDIRMANHNKICAFLRKESESLKWVVLSEKRLTTDEGRVGVPDLILTKDNKALVIDVTICFERDITTLENACDGKVRKYSVFKKAVSDLLPGVRKVECFGFPMGARGKWYEGNSRVLTEIGVSKTRAKTVATILSKRVLLRTIDMCKVFKLLILEKANKK

SEQ ID NO: 260 - protein, 1126 aa, synthetic construct
  source 1..1126: note = MG140-116 retrotransposition protein
MTATPVKPWTRTQGPQGGNPPTKLRIPWPVVRRKCPECSVILRSLGMARWHVKTQHPGRELVVKCRRCGFLSGLRQEMVGHSCGGATSPQKSSRTRTAARALGAVGNPLATPVRGYITGSMSSPKTVRSPTPKSSRAWTSNDLQVLGDLVKRCGRSRVTARMAKLVLPGKTEYQIRGKLRSLYAAAMRAGSDDSEGEPDPEVMALSTPPGPVSAVRGCGRRLRWLARQMVAAMPDRGNPFTKALAVASRGAVVTKRQIRRATARAVEELSAIRASVVKHKNVGRLLVTPRPRPFSRRWVRREKFSRVRRLLETDPAKLVKWLLDGMEDTVCSIQLPKLRKVFGERWADAGASYVGLGQFEASGGADNSVFDKLFTPGEVVELRSRILTGSSPGPDGVSKLELLRWDPCGTKLSLLFNSWLVAGYIPRCVKPARTVLLPKSKDAKVLAGPGGWRPITIGSMLLRLYSKLLNERLSRAMPINLRQRGFIRAPGCTENLCILQSLVKKNYTDKGTLAVVFIDVAKAFDSVAHPHLIDALRQRGLDSHIIECVRQMYEGNLTRIELRGSFSEPIAMKRGVRQGDPLSPLLFNIALDPLLCTLEKKGDGIRVGAHNVTTLAFADDLVLLSSSWHGMKRNLDILAEFCKLSGLKVQGAKCSGFFLSPNPTSKTRALWCNHCVPWTIAGEGVSMLCGAETTRYLGMQVGPKGGIRSPDLMTLIRKWLEQVERAPMSPSQKLWITRTHVVPRLIYQAVQGNLSATRLRPVDRVIRNAVKRWLGLPQSTCNGLLYSRARDSGLGLQHLEKVVPALRAKTLFQLLQCDEEVVRELAWDRHGLYEFARRWRSAGGNDILRPLLPQEYTGLSDSDSSRDESAPMPVLKTAWRNPTDWRADAFADWTIRPVQGVGIAGFRGSPESNAWLSELSKRRLPYFPQCVRLRGNVCPTGEFRARGRVKTYAKCRICPRRLESTSHILGMCPVTRKARIARHNWICERLVSQAGALGWKVEREKTFHLSSGRSLRPDLILISRHTAHVVDVTVRFEGGYNTLQQAARDKVGKYRPIIPVLRKSLGVKTVKVWGFPVGARGLWYKGNTRCLMDLGSSRAKAKALGKKICKGVLIRSSKMIRDFLKQ

SEQ ID NO: 261 - protein, 1128 aa, synthetic construct
  source 1..1128: note = MG140-117 retrotransposition protein
MAMYTPPGSSGGVSRLSLPLSADRSSEATLKGRLLFRRSHSPSHASEDPDSLPISPKRPRVGPLPRRTLFPSKKEKSGVLLFSWDKDWRKPQRLRGRLPPSVSVGLRAPWTGQACTLCKVLLPTLKAALLHFTKTHRPRKVLFVCLKCARTYRTAENLSRHTPKCVHKKVVSTGRLVPCLLCPARFSSRGISLHLRSKHPVEYFGGLRGPGQIKEPVTPVPKGKCFREQLERLSHGIPPVPEVHGMAEAITSHLSADPLGGGGIVTKKGARNLVIRLIKRLAGRKRVPIAPRKQRFSGNTFPKLRRRFRRVNEYRSIQRLWRTDFGAAARLILDGRVEASCDVPLQVIAKEYQNIWARSDAFLTLGQLASLPTVDNTGLNMPITSTEVVFVLKKANAGSAPGPDGLVRNALLRFDPSGRILALLYNRMISSGDLPALLKESRTTLIPKCSLGGGPPDVTQWRPITIGSVLLRTLSGILNRRLVAVSPPHGSQSGFVEGKSCSNNLLMLDSIISYAKHERKTLACVFIDLTRAFDSISHKHIDEVLARRGIDSMFRRFIHNSYSGCFTRIRATEGLTEPIKILVGVKQGDPLSPTLFNLALDPLLHVLEREGQGFLLGSRSISALAYADDLVLISDSQQGMLINLTLLEVFLHLSGLGVNPKKCRGFLLERCGTTMSLNDTPGWLIRGTPVPTLAPKETWLYLGVHISPMRGITKPLTLLILRKMLEKIAASKLKPSQKLTLLRGCAVPRLLYQADIGMVGVAELRESDRLIRKAVKEWLHLEPSTSNGLLYSTFADGGLNVPKLELQIPLMQLLRIKGFCGSVEQDLLQTWPMGALKKTLRTLWEHVQKYPAFKARFADTEVEDISKKEIRSCKWRSDDFNRWAALPLQGRGVECFRADKISNRWLANPQSFYMSQSDFVWALKLRTSTVSTCGRSSKLTKVDPLCRLCGEQVETLGHLIGCCHFLKPNRSRNHNNVCDFLARVATKMGWAVYRERHLRAPDRSIGVPDLITVKGSRALIIDVTIRLENDSSTLEEARAQKVRKYVKFSSSVIQSFKSVTFVRVFGFPLGARGKWHPRNSEVFTEWGLSKKATRVMAMSLSRLTIKQTISMLKLFNQTIKHPNSPSPC

SEQ ID NO: 262 - protein, 1331 aa, synthetic construct
  source 1..1331: note = MG140-118 retrotransposition protein
MIVPLVFNGQDHPSGLSKWVPVRLGMGSTLRWRSCPACVFEVGHVWNWRINLPSGRWDQPLGELSRVPNGTGATASSPPLPVRKTISVAIQVQESDWPICPEVPSVVSESTAYAGSARSVESVEGARDPQPGEVDVASESTAYAGSARSVESVEGARDPQPRGVEVQERDWPILPEVPSVVSESTAYAGSARSEEPVEGAREPQPGEVVGAMYTLPEVVRADSPRVGADTLNEVRVLLPWLASDCPLCGVQVKGIVALGKHFAIRHAGVTAMYVCGKCGRSNISRHSISCHVPKCGGGVAAAGVEGEPASGFACDLCDARFPTPVGVSQHKRHAHAAAWNEVRLARRKVPGGEIRATKLWSVGEVQTLIQLIREHGDTVATYQLIAVELGNGKTAEQVRSKRRLLKIDMAGDCSNIAEEEDCSLSDPIPQAERSSPPSPQVLSSDRIREALVGWGDREGGEEVRAIASLVKDVDQNPFLIESSASELISKLGGGVERTGRARPPVREQNQARGWVRRLAQRRRAYRECQYWYSRDQARLAAQILDGAESQECALPPDQIYEAFRERWEGGGQFHGLGEFRTDLVSDNWEFYNPILAAEVRENLSKMSNGTAPGPDRISKKGLLDWDPRGEQLARLFTTWLVRGVIPRAFKECRTTLLPKSTDPGELQSVNGWRPVTIGSMVLRLFSRILSMRMARACPLNPRQKGFLASSSGCAENLLMLDEIIRRSREDGSPLAVVFVDFAKAFDSIAHEHILCALGERRVDTHVIELIRNSYVDCVTRVNCVAGYTQPIHINRGVKQGDPLSPLLFNLAMDPLIHRLELARFGLQWGDQGRISTLVFADDLVLVAGSVEAMNGSLGILEEFCQRTGLSVQPKKCHGFYMDKGVVNGCEAWRIGGAPIHMIPPGESVRYLGVQVGPGQGIVTPDLIPMVRSWVMRISEAPLKPSQRLRLTNTFVLPRLMYQADLGKVPATKLAQIDGLVRKAVKQWLHLPPSAGNGLLYSRVRDGGLGVLRLERLIPSIQVRRLYQMSRSPDLWTRTLTKRAVMQLDWEKLWIKAGGDAGSVPVMGTGEANPPDAGSPPVYPDWRRGENLAWAALEVQGVGVDQFRGDTISNSWIADPSAVGFRQRHWIAGLAVRTGVYPTKEFLARGRDKSGAACRRCLARLESCSHILGQCAWVQGSRIRRHNKVCELLATEAERYGWTVTREFRVDGPEGGLRIPDLVCKKADTVFVIDVTIRYELDGDTLARAASEKVARYLPVAAEIARRIGGRCAEVRGFPVGARGKWPSSNNTVLMELGIPVGRRRAFARLVSRRTLLYSLDVLRDFLREPEG

SEQ ID NO: 263 - protein, 1362 aa, synthetic construct
  source 1..1362: note = MG140-119 retrotransposition protein
MSGNGKVGQDHRSALSKSVTTRLESGSGAVWRSRPTGGFETGSPVYWRISLPSGRWDQRTVERVIPRRSVGVNTDTLLPGPTLKPGNIVCKSSSVGTQTSAADVGRPYPGLAPACRQDNRSQLLIVSMTFVNSRLRESEYIEISQQPARTTGEVTDVAGSSMGQEGPEVGDGLEGVLPGLGPEGPVPGQPNQARLAVPVMTATDTLAPRVSTPQSASTESHGSPQRGERVGQSPDRGEGANDQIRMAVTSPGADEVDEEIMLRSAACEEGPLEVLMPRPDLICQLCGVHAGSVGMLGKHFASRHAAVKVVYKCRKCGRINTNSHSIACHVPKCRGMGGGGVATQGEFACLLCPARFGTGVGLTQHRRHAHPEDLNRERLAAVGVKSRLRPTKLWSMEELERLITLSRRHSHDPNVNVIIARELDTGKTAEQVRSKRRLLVSELAGDDPDTAAMERIVDPIDELANPVVLQSPPNSVRNELRRALDTGGDEISQNEIRVIAESLREVDQNPGLIESSASELITLLGRGGRAPCRRNGEDTVNGRVQKGWERRLSQKRRDYRVHQRLYVDDPARLAALVLDGSQGAECGIPIEQVYEAFLDRWEAEPTFRGMGGFRSVGTADNGEFAFPILACEVRENLGGMKSGAAPGPDRISKQALLDWDPKGEQLARLYTTWMMHGVIPRAFKECRTRLLPKSADAGELSDVSGWRPVTIGSLVLRLFSRILATRLARACPLNPRQRGFLASSGGCADNLVVLSGIMGRARRSGAPLAVVFVDFAKAFDSISHEHILCALRQRQVDLHVIELIRNSYVECVTRVGSAGQSTPPINMKVGVKQGDPLSPLLFNLALDPLIQALQDLGGGFEWGDQSVAALAFADDLVLVSGSDAGMRRSLKIVDSFCQLTGLRVQPRKCSGFYLDKGVVNGCEPWTMGGSALPMVGPGESVRYLGVEIGPLRGIVTPDLIPKLQEWIVRIKRAPLKPSQRVRVLNSFAVPRLIYQADHCEVPVAALAKLDLTIRRAVKSWLHLAPSTTDGLLYSRNRDGGLGVVCLQRMVKSIQAKRVYRLAQSDDSLTRAVTLDTISQSDWTRRWRLAGGPENEVPPPLGGSESLSLPDWRQEVSRAWASLQVQGVGASLFRGDKASNSWFTDPARVGFRERHFIAALALRAGTYPTREFLARGRNKAGAACRRCGARLESCSHILGQCPSVKGSRVRRHHKICELLSVEAERAGWSVTREFRLRTPGDGGAPGELRIPDLVCTKAGQALVLDVTVRYEMDDSTLARANEEKIAHYGPVATQIGEMVGVGNVRVFGFPVGARGKWPAFNNRVLQLLGLSVGRRAQFAKLVSRRALLYSLDILRDFLSEPTW

SEQ ID NO: 264 - protein, 1268 aa, synthetic construct
  source 1..1268: note = MG140-120 retrotransposition protein
MLVREEMNGQDHPSGVSKWVSTGLEEGLMAVWQSFLTLGFVVGFEVSERSNLPSGRWDEPAGVTREVPRKGLEIKNNLPKLYMDKKSRTAQTQTSAEDWCTMSVWRAPTAEDPQVIVEAMTVVNSYIGYGDAEYLPPTRPVVSEKSPLDEILEAYAVRPKEKHQPQLTSEEVDQGEHIVTPDPACITITLPSPKLECPVCGVETSGIMMFGKHCANRHAGTQVLYACRECGRTNANGHSIACHVPKCRGIVENVREEGEFACELCKKGFESKVGLTQHKRHNHPVELNRERCAARGGGTGGIRGTKLWKAEEVKTLIRLERKYEGGPMANILIAEELGSGKTDEQVRNKRRLLLAERARHGLDCEQGEQEPPETTITPLPVPDSVHNQLRAALVGRDGMENESEVRAMAEFVRDVDQNPDLIQSSASDLISRLGEHRAPRRGGGGGEQRRAMKGWERRLSLKKRDYRVHQQLYLRDQAKLATLILDGEDEVECTLPIEEVHGAFRERWRGKGLFHGLGKFKSSSKARNEEFYMPILSAEVRENLAKMKNGSAPGPDGIRKQALLDWDPRGEQLARLFTAWMVLGVIPKEFKACRTRLLPKSRNAMELKSTDGWRPVTIGSMVLRLFSRILTMRLSRACPLNPRQRGFLASSSGCAENLVILNGIIKRSRLTGDKLAVIFVDFAKAFDSIAHEHIQCALEQRHLDQHVIELIKNSYVDCVTRVGSAGIKTPTIDMQIGVKQGDPMSPLLFNLAMDPLIQRLETKGDGLSWEDRKITTLAFADDLVLVSGSDRGMRRNLKILGSFCQWTGLKIQPKKCHGFYLEKGVVNDCKTWKIGEEPIHMIGPGETVRYLGVEVGPCHGIKIPDLIPKIQEWIGRIKKAPLKPSQRVKVLNSFALPRLLYQADLGGVPATTLAIIDGMVRNAVKTWLHLPPSTCNGLLYSRNRDGGLGVPRLERAIPKIQIQRAGKMASSEDEWTSRMTMSTVTREVWCRMWRQVGVGREEVPEWTLESNVSGGSPVIPDWRQAENMAWQKLQVQGVGADQFAGDRLSNSWLYEPMKVGFRQRHYVAALALRAGVYPTREFLTRGRPKQHATCRRCHAKLETCSHILGQCPAVQGSRIRRHHKICDLLAIEAERVGWETTREVRVVSPEGVIRIPDLVCVKAGKILALDVTIRYEYESGTLMAAAEEKVVHYTPIKEQLSGLMGGGTVKVMGFPVGARGKWPSCSTAVLIELGLTAARRARFAKLISRRVLLYSLDVLRDFLREAVR

SEQ ID NO: 265 - protein, 1354 aa, synthetic construct
  source 1..1354: note = MG140-121 retrotransposition protein
MAKRVAFLCGRTDHLSHYLIINGNGMTTSRIFGQDHRSALSKSVTAGLEVGSGAVWRSCLTPGLEIGQRVYWRINLPSGRWDQPTGERVVSKRSVGVNTMAPVGGRWQPLGAAVRKTSSVGTQTATSDLVRLNLRRIGEYEGVLPQVIVESMTFVNSFIEVERARVVLTSQPVNAEGVVTEGAGTEDSRGEPDPGGAQRSGDTLADQGAQVIPTDVATSAPMGDPHEGGNREGADDQVGFTETTPVAESEEEQSTPRRRNIDTDVFLEVLLPDPDPVCSLCGVHIGTVGRFGKHFAGRHAAVKVMYKCRRCGRSNQNSHSISCHVPKCAGRGERVAQGEFACDLCQARFQTAVGLTQHRRHAHPAEWNREKVAAAGTSGKFKGTKLWSVAELEILVELSRRHSDDPNVNKIIATALGNGKTAEQVRSKRRNMATELARNGSHEAAQNGITDPILALAAPVVSQPPPHLVHTELRMALGEGGGEESDNEVRAIADLLREVDQDPGLIESTASDLIRRLGRGGGAQGQRRGEGTGRVLKGWERRLSQKRRDYRVHQRMFTSDPARLAALVLDGSQGTECAIPISLIHETFRDRWEGEVAFGGLGGFQSRYTADNGEFAYPILAAEVKENLNKMKNTSAPGPDRISKQALLNWDPRGEQLARLYTTWLVHGVIPDVFKECRTRLLPKSGDAGELGEVSGWRPITIGSLVLRLFSRILTMRLARACPLNPRQRGFLASSGGCADNLMILNGMIRHARGSGASLAVVFVDFAKAFDSISHEHILCALEQRQLDRHVIELIRNSYVNCVTRVGSAGEFTPPINMKVGVKQGDPMSPLLFNLALDPLIQALDDLGGGFGWDDHTIAALAFADDLVLVSGSDAGMRRSLRIVESFCQLTGLKVQPRKCHGFYIDKGVVNGCDPWVMGGTPIHQVGPGESVRYLGVDVDPGRGIVTPDLIPKLQEWIVRIKKAPLKPSQRVRVLNSFAVPRLLYQADHCEVPVATLAAMDLTIRGAVKAWLHLAPSTTNGLLYSRNRDGGMGIVRLERMVPTLQARRIYRLSQSEDAWTRRVTERTVAPVEWQRKWRLAGGSIDEIPRLGREEGTDARGSSLSLPDWRQDENRAWAALRVQGVGAAQFRGDKVSNSWLSDPAKVGFRQRHFIAALALRAGTYPTREFSTRGRNKEGATCRRCGARLESCSHILGQCPFVKGSRVRRHHKICDLLAIEAERTGWSVAREFRLTTPEGELRIPDLVCTKGSLVLVLDVTIRYEMNSETLAQAYTEKVVHYAPCARQIGAMVGGSEVHVHGFPVGARGKWFAPNDRVLSELGLAAGRRAFFARLISRRALLYSLDVLRDFLCGSVW

SEQ ID NO: 266 - protein, 1219 aa, synthetic construct
  source 1..1219: note = MG140-122 retrotransposition protein
MIKCKSDMDRNSKTILAGGSPRIKSRLRDARGQASSNRARPPCGSVAEDRRSDGGHPGSEPLLVPGLRECSVVLTRLHERDVGAERPPGVMCSDTEPFGARGSAEETPSSGHPDASQGGGPAVANPTPEEPHVVVLLPIENYTCALCGVSAGTLMWVVNHFATRHGGVLVRYSCRLCGKASTGWRTIVCHTPHCNGGIGRRQRSGAFACEECGRGFVSNRARSTHERHVHPDLRNRKRSRQVPAASGGSSAFTQTEVEAGVLRALGEGVDPKRPRLIEETDSPMLDAADPPVAQQTLILPDGGLSVGLREVARQMVGGAEDGEEGYVRVLSAWLEGDDEVPALVESLASEILLRLRDVAVQQLPAVRTGRSLGGTAGPRWQTTGKARRLAYHACQLKYTRDQTRLAAELLDGTCTSDCPLTTEEVYGEYCGIWEGVTAFGGLGPFVPFGLASNGHMAGPISAEEVKRCLNQAANATAPGPDRIGKQNILAWDPGCEKLSHMFNVWWITGVIPKCFKQCRTVLIPKTSDQSALGEIGNWRPITIGSTVLRLFSRVLTKRLVDTCPLHPRQRGFRTSPGCSENLEVLRSLFEHCKGERSQFAVVFVDFARAFDSVSHEHFLCVLRGMQVDPHVVELIRGSYQDCVTRVEIGDRQTPEIDMRVGVKQGDPMSPLLFNLAMDPLIHGLERLGKGLSVSGTKVTTLAFADDLVLVSDSWQGMAHNLGILEAFCDKTGLKVKPSKSNGFLLSPTRDSFTVNNCPPWVLGGSPLRMVQAAETVGYLGVRVSPWKGIVQPTLYEDLLRWCENINRAMLKPSQKVVMLNKFAIPRLLYRADHCDVKSGTLHLLDRTIRERVKAWLHLPPSTCDGLLYARNRDGGLGICKLARLVPSIQARRIFRLSNSTDGVTRSLLDSDLAKSKFKGSWLRAGGKIEHLPQLGSEGQNTESAERGEAAGPMMPQCAAPLDWRHDEFLKWAGLNTQGVGILSFYNSKVSNSWLAKPKGFKERHYIAGLQLRANVYPTREFRLRGRGMVGASCRACPHRLESCSHILGQCPATHRSRIVRHNKLCLLLATEAEGLGWEVRREWAFRTPSGELRRLDLVLIRDSLVLVIDVTVRFEYAPDSLTRAAAEKIGYYGPHKSTIARELHAREVRVFGFPLGARGLWFPGNWEVLTAMGVGETRRKYFAALLCRRALLYSLDVLRDFNRLAGLGQGGQRGRRRWR

SEQ ID NO: 267 - protein, 1163 aa, synthetic construct
  source 1..1163: note = MG140-123 retrotransposition protein
MLKRNGERRDLDDQADSTPHKIPRKGSAKRTLFPRQHEGNHVFFLSWEKGWRKEMGSSNKLPHSVQVGLRFPWNPTACPICHCLLSTGTTAIAHMRRTHRPRKLRLYCARCSLQFGRHSQISTHVPKCGERAKATRAGSTDFACDHCPTAFASRSGLANHKRVKHTETYLKELNSTARDPKKGRAIWSHEDVDYLGVLLAKSGGASEALLEAQGHLTQYSRRQIASKCRQLLKTQAESKLALTQGTVGVEYDRAAMERPLSPLPPTRMVKTLLDASLASEGADGLIVPKTVDPKVIDAYLREVITQLAGHRKLFKTKSKTATRRIRRRATKRTEKAANYRRLQRMYMKDKRATAKYILDGASTSACPVNPRTVEQAFKQVWQSKDLFRGLGQFGLLPSSDNSVLCGPISPAEVLRTVKSIKRNSAPGPDGVRKTHLLKWDPTGKKLASLFNAILYCGKLPKCLKGSRTVLLPKTSSEKDQLDIGNWRPITIGPIILRAFSGVLNKRLTEACPVHPCQRGFIDTPGCSENLALLEGIMRLSRLEKAQLGVVFIDVAKAFDSVSHKHIQEVLERKGVDEQFRLLIQDSYKGCHTVVQTKVGVTGRIRLRRGVKQGDPLSPLLFNLAIDPLLHALEKFGIGFEFQGAKVTSLAFADDLVLLSNSWAGMAKNLTILEHFCDVTGLRVNPKKCHSFMIKRNGSKQYSVNGCEQWTLSGIPLRLIGEHEAERYLGVMINPRKGIVKPPLRDTVKGMLENLSVKGLKPFQRLELLKIYALPRVIYVADHGNAGTAELAACDRDIRTRVKAWLHLEPSTADGLLYARPKDGGLGVLKLSVHIPAVQLKRLLKLFNSEVQNIRTIARAATPDRALERLWNRSQGIITSKQDAGTFTPSRIDESKLAAKVWRATEHQRWSRLPSQGVGVTVFENDNISNAWLRDLSRNGFTTAETILALKLRTSTVPTRANEMKGRSPRTNEVVCRLCGTDKETVAHIMGRCRTLKRNRMSRHNKVCDLLKGESELKGWSVVQEKKLTLDTGEVGRPDLIMVKGKTALVLDVAIPWEVTGDTLADAERGKSDKYKKFVRTVLELYPGVERVRVSGFPVGARGKWHKRNDGILQEIGLSKTRIGSFSRLLCRRALLQSVDMCKTFRGLVAPKGARGAGLRGNLA

SEQ ID NO: 268 - protein, 1027 aa, synthetic construct
  source 1..1027: note = MG140-124 retrotransposition protein
MMSNRTLSGTDQIPCTDPDCHQLFNTVRGRNIHFTKKHGKGRSSNSITNFENDDQCTPNAGPSQHNRMLCTVSNCNKSCSGTVGLTSHFRQAHPVLHINQIANKYDSPAPNTTSECEESTPVDSPRSTTRKNENEQIQEIMANYENDLQVLLSESINTDKLDGITDKLFVEFRNIIKLLPGPQHPASKFYEARKKKQQFQSDHRTFSTTTNPQRKSKRERQRRKEQYNYDLCQFLYYNQRKKLVQRIINTQGYEPCKIPTADLYDSFKSRWCVKNSKVLHQYETVEPEEQKTLDEDFLDRFSEEDVKAAMKNMNIDTSPGPDHIYMRTLKLVKCEKVIALLATIMLQWSYVPKIMKEAKTILIYKGGDKSDPGNWRPISIQSIIRRIIERILDRHLRKFITFNNNQRGFTKHFGTLINTNILDGCLKHAKSSETDITIVLLDIIKAYDNIGHDHLKNCLLSAKLPSVLRNLIINLIDDNFTRIQACGSQSKPISFLRGVLQGSPLSPSLFNLSIDFILRQLSETELSEKYGFQLTPELPNLSVTGFADDTCVIGNSKGSAIELTSMAKHLFNSIGLDISAKKCIAITLIEGELLEDTLQIDNETTIRSIRNNESVRYLGVPFTDEIIFDEKKVICNLKNDLNTLSSSAVLRPDQKLNILNQFICPKLTYPFQMAPFAKIKKDFLEDVDIIFRSTIKTIIGLPNDTPNSMLYSPRRYKGLGLLRANWECYIQIINSCVHLKKESNPHINFTRCLDTDIEKCRIALKLEDNCSAFSGNEKTLGQRIRNHLRNKEFDIWCNLKQKGIGVILYKECPKSNNWVFSKFGLSCSEWTNAIKMSCNTLAVRSIPGRSTDGPLCRHGCKESETLGHVLGSCPKNSLLINARHHKVRNLIAEALRVKKFEVLEEVTCVALNGSTRRVDILCFNPVTRKGWIFDPTVRFENHEGQALEVDQEKKAIYEPCIPYLLSNYNLLHLDVIGLFIGSRGTIPKFFDEFRKSMNLPHSLTEDISLTVIRSSLHIHHNHTYNPI

SEQ ID NO: 269 - protein, 1002 aa, synthetic construct
  source 1..1002: note = MG140-125 retrotransposition protein
MTNRARRNGIPIMASTSTAHIPEAPDPRNLNQTDGQVGCQYCGKFYKGKRGLGIHIAKQHQEIHRDQISQQYQAPPAEIIADNPDLNPQYIDQDDQQSQESQILRDRIQSFEERFEEMANEELNPEKFEQCYKDLVLFLSDADGTLPGPKHPSSKFYHARKRRNKNYTTNDRKFAESSNPERASKRDRQKRNEQFQYDLMQYNYYHRRKKCVNQLMSSDKNPQCQIPMKDIQMAFQERWGTPNEKMRSEYGPEVDSIKQAEIDAEFNFVIPSQAAERAIRGINNDTAAGVDKITIRTIKNLKCEKILASITTIMIRHGYVPTEFKQARTTLTPKKGDLLRTENWRPISICSILRRVVERILDRVIKRYISISEHQRGFTNLPGTHINTALIAACLQKAKVKKMDISVVLLDIIKAFDMIGYNHLEQTIKHTSLPTMMKTLVMDLQTDNYTQIHVNSDTTQKIQLRKGLLQGAPLSPTLFNLSVDYIMRELTENEIAHQFGFPLVPTLVPLSAAGFADDTALIGNSGNSAVQLAAMAKQLFKDTGLEINPRKSAVIHIVKGKQVVSDLKIDDNDEIPGLKIGEVIKYLGVSFQGEMIFDQEAVINSLNNDLKQLVTSALLKPEQKLGILNQYLWPKVIYPFQTAPVGKIPQSFLEDMDKITRSSIREILGMPGDIPNSMLYSPAKYKGLALVRAKWEAPIQVHNICQTLQQAGNDHLMEVRDFEKEMEECRNKLGVTEEEYEEMRSSDADESETPKKISAKFRATLREREFDDWCALPQKGKGVALFKQEPSFNKWLMTKKGLSSSEWTSSIKMTANVAAVRVIPGRSTQTTRCRHCNEIETLGHVLGACEKGTLLRNARHHRIRKMIADGFRKTGLQVFEEVHCVSDTGSTRRLDIIAINTNKKSALVLDPTIRMETGVDQPESVNTEKKGIYDPCIPYLKDKYKLRSVEVIGLFIGSRGTITTFLHEFVKQHKLGKSLLDEIVISVLKSSAHILHNHLYSQ

SEQ ID NO: 270 - protein, 1116 aa, synthetic construct
  source 1..1116: note = MG140-126 retrotransposition protein
MLLSIPLFRGLRLVGLTSRLVGRLNLKFVPKQTRLASEVQPTCPARSVDLTLNNGASALTLQSVAGGDNSANTAEGRNSAPFACDIDGCDRSFGTARGLGQHKSKAHREQRDQQLGALRGENLGRSVWGAEHLLLLAREELEFCRRDPGAQQKAINEYMSSTVFNGQRTVEAIRGQRRSQRYKALLAQIQAESEPPVVEVVPPPVVHEPVEAGPTLGQVASESFHRVLVEFRDKESPIAGFIPGEKGSAFVGVNMCQDDLNRGWENWVSNAQRAAGIERRVKRANKTSTSRPSGVDRETSALNVRSNPRVGTPNRTQRRKRWRAEVQSRFERDPGTTTKDILGGNSITALCDPGTLAEHWKKVFSSESVVDPRRPKPPVAGCMWSLWAPITLNELKGALAGTKHNTPGSDQLGKRELLRLEQSDLLAWFNLWLFSGRLPSQLTRADVTLIPKCDMAAAPAQYRPIAVCSKILRLFHSILSKRFRTVALPEEQRGFRPQDGTFESTWLLKTILDSARQKPKATFVAFVDISNAFGSVSHDTLLKACVHIGLPPPLIRYVETLYSQFTVKIKGGTGDEVKVGCGILQGDPLSSDLFNFAMAFICQELDRKVGYSMEKRVAGTDSLLSYASYADDTFLIAETREGLRMLAGQLEGSLWKAGLTINASKSATLAIDVAGTKTKTWYCSPQPFIDLGGRRVPALSVSGTYKYLGVNAGARGFDNSSIKPYLVTRLERLQRASLKPQQRLYAVRQHLIPALYHGLILGGSKAGALKDLDCLIRKRIRSWLHLPHDVPMGVFYASIGQGGLGLPCLATKIPTLRSLRMERLQKTDQENLKKVVESETGQKLATKDLTRPRLDVADHRVSAKIAENQHWSGKLHGSVDGRGLNQHGRVPAAHAWMRDPSLRISGGEFIRALHTRLACLKTPLRAARRGNTSAMCRSCADSVCSLGHILQVCPRTHGLRVKRHNDLVKMLVTALKRQNYEVIEEPHFRLERSFCKPDIVAIKRGQVLVLDPTIVADGFPFCEAMTTKERLYGNDEVLQQVQLMYKERFGSVPAGETPPRVIVSGVAVNWRGGWDFQSWAVLTKTARIPPRYLILASIRVLCSGWSAWAATMRRTN

SEQ ID NO: 271 - protein, 997 aa, synthetic construct
  source 1..997: note = MG140-127 retrotransposition protein
MAKLNEAQRKRAKRAETRDETKPRKGVWTDEEIEQLHVLCKKFEGERFINKLIEVELVTKTNRQISDRRRTEAKKALTDFATKAPEANPGRTEATKALTRPATKAPRDTANPRARKRGKTEPTPPSVATDTIDGSLFIEWLTDKELSRDNPERCEAINILTEAIGGTDVTDQVENLMKKLTEIWTVDDRINKKPKGKPTKARARSIKGASEYRRVQELFKRDKKRLATEILDGKVDNSCPVEVDEIESTYRERFGGISQGVDLSDFPAPLRTADNSETLKPFTEGEVRRALLKMRRNTACGPDGITVGALRVSRHLLTITTMLNVFLLTGKVSKLIQGNRSILLPKGGDPSDLGNWRPLTISSVVLRLFTKLLASRLENAIYLNPRQRGFISDGGSGCADNVQCLDHLIHHAKTEGKTIAVALLDLAKAFDTVSHKHICSGLKRLGVTGHFIGLVEELYDGAQTYFKTPKGITGMLPMTRGVKQGDPLSPILFNVAMDPLFCLIDAEGSSYDLEGTTVSMLAYADDAATVAGSREGLQRNAELAVEFTKTTGMKLNVKKCCAFVIKPLAKRTYAVNDCSPIQLDGTDVPWLTPGKCTKYLGGKVDPWKGFVTPQPLKKLVTWCKRIHKAALKPRQKLSILTQYAITRVMFSLGLNIPSKGSLEELDTLIRKWSRRWLHLNESVNNYMLYARPRDGGLGLPKLAKEVPVAHINNLLSCISSKDDTIRRVAESANFEVKIEETRDLFSLPSWKAARVSNTGWRKQEARAWAALQSQGKGAELWYDDAVSNTWLSPRSFLREREVLTAIALRTNTVPTREALGRADKGRDVRCRRCGSAVETLGHITGACMFVKRNRIKRHNHVCFAIRRSCTRRGWAVLEEPRIVVDHQTFKPDLIVWRDNTAHIIDPTVVWDDSLKSLQTAAEDKHRKYQGIRDAVGKLTSCTEVICHQGFVIGARGTWYKGNNSICEAVGIDAQSRKYICQIVLCGTIKLLGAFMNL

SEQ ID NO: 272 - protein, 1126 aa, synthetic construct
  source 1..1126: note = MG140-128 retrotransposition protein
MLRQRGDAGLDAPVPGVAVAEDACNGPHGGERIYMPGVVTNSGTVESVGEGDSSKMVVPMPFGVLACPCRQAFCSVYEFELHMDRAHVDVDLRYRCDICSKTCFRAHGAKIHRSKCRGQKTISRTDLPWGCNVCAMAFRTKSGLSQHKRHRHPAIRNLERKADCKSVVEGEVTVLTVKPTKLWSLDEVERLRELDVKHHGKRSINLLIAAELVGKSNKQVSEKRRALFGSRAKSVGKKSVSVPAKRKTEECLARSVERVPEQAFWQFVENSKNSIEGLRHKEALQTLVDLLQDGDVVRSMSGVSQLLADITPVTKPQLRKGGKSKKKVSLKVRRRSKTKAEQYRHQQQLFTSNKKKLLAEILEGVENSRCPLSVESVEETFRSRFEEGSSKVDMSHVPRPLNSMDCGNILKPFVPSDVMKVYSKTRRDTASGPDGICLKAIQRWDPRGVKLAAVFNIFLMSGKVPESLKSNRSILLHKGGETDEIGNWRPLTIGCMVLRMYTKILAERFQEATPINPCQRGFVRGGGCDDNIHLVEGLVRDAKKRGKPISVCFLDLAKAFDTISHDHVIAGLVRFGASEHVTRIVQDLYQFSKTRFTIPDGTTGEITINRGVKQGDPLSPVLFNIAMDPLFCLVEKSGVPYRLEDGTAVSVAGYADDTLVVSGNRDDLQVNVDLVSEFCRAAKLKLNARKSYAYTIRPVAKTFLVNCGDQLRISSEVVSWIEPGVPAKYLGARMDPWVRSVRDDPNEDLRSWCVKIGKAALKGRQKFILLTQHLLPRLRHRLAYGNPGKVTLCELDVTTRLYCRKWLHLPECISSAFLHTRQGDGGVGLPCFEKEVPMNRVKSLYRMLSSKDSRLLSIAHAIGMGEVLEDHCRRWAIDYPIVSVSKLVRRVKRSMRSGWESLGSQGLKGSFWKSCSASNGWMSREVLSEREHTVALQLRSNTYPSREAICRGRPGSNVACRRCGLSVETLGHISGRCMAVKRSRIKRHNKICGILVSSTHGSKWEVMIEPHIKSEGKTYIPDLVFLRGSEAVVVDPTVVWESKVTSLSHAASVKVAKYLPIVDALKELTGCSSVSVYGFPIGARGTWYKGNNRVLDVLGVHRSKAKFFCLTALCDTIKLLRVFTDR

SEQ ID NO: 273 - protein, 1382 aa, synthetic construct
  source 1..1382: note = MG140-129 retrotransposition protein
MESWGTLTLEGQQWYRNGDPISTGDLDYYLTDYAVPSSSQRDGDTGSDTESDSEEDDRPQTEADGLSGDEHGIILELPSATQQCPKCSVVLNTLRTLQEHLGATHGIRDVLFRCRLCKNIFDRVHRLECHAPRCKKGTRTPSGAGLKYICDGCACRFPTKSGKSQHERHRHPEIANNRRIKATELIAKQKREKRHAAKRLKRQAAESEQEELLAAKERARLQANREREAILVGEKPGEANETRVLRTEWDEVATEIFLDIYCEMGDEKGLHTRVRAALQVAGYDIPLKRISERKRTKGFRFALLDKQEQNRKEEEVAPDQAGEAARSTTKAYPSGQQADHNVECMDTVTAETLLLSLERESEARILQTKWDTAAIKILMDYYCITGDTKGLHTRVRAALRVAGYDISQKRISERKRTKGFQKSLLERQKRSGIEQEVAPEQTGEAARSTPKAYTSGQKTTHATECLDSSTVETLLLSLETSGDEPEARIAALCRTVQKTGTEGEAAEVAYAAHEQLLNDFIAPGPMAPTKGAKMPRYRKETKVRKIRTKTLKGKAKERVERYRNLQQKWKRNKKNAVKQVLDGASDAKCQIDAEVIEATYADRFESAGPRVDLSNYPGPFSEPVLPKIATETGSDHEKQSGQNRQSEPCPKRLLEAVSASEVRKAVRAMRTGSASGPDRITVAQLKKKTEENPGFLAGVYTLWMMTSKVPEKLKTSRSLLLPKGTTDLQNIGNWRPLSISSVIMRLYTKILAKRLTKAVSLHPSQRGFIPAPGVEQNSVLLEHLIRKQKKEKGTLAVAFLDLAKAFDTISHDLFAKGLQRLGVPSQFIRVVEDLYDGATTSFTTKNGETRQIEINQGVKQGDPLSPILFNVCLDPMFCSLERDGKGWGSDKTSITALGYADDTAVLSDSRAGLEKNLALVKAFCDQVGLRLNVNKSYVFHIKSDGRTFTVNDTAPYEIDGGRIPWVSPDNATRYLGKMFGPWGGMSIPNMKQQIEEWARSVAAAPLKPMQALEIWRDTILPRIKARILHSRPSAALLKSLDIQIRGHVKTLLHLPEQISNAMIYAKTRNGGLGIACLEDDIPDLTIRGLHKLCWKAKSDTIRRHAQNLGVRDTLEDLCTRYPQCKPAEPGNKKREEEDPQRDRAIPRSKWCEYLASQKTQGMGSTTWMKYKECNAWIRAGTFSNGETIDAILLRANCIPTRECIGRYTQSTDTICRRCGMTTETSGHISGWCPSVKRSRILRHNSLCKILGNKALKQGWTVHWEPILNGPKGKLKPDLIFVKDEVAVVVDPTVIWESDAECLVKAAQVKVAKYSYLETQIKDRFEVTEVQVFGLPIGARGGWTPGNDQVLRALGIPVGQTRRALSVRALGGTITLISLFFDQ

SEQ ID NO: 274 - protein, 985 aa, synthetic construct
  source 1..985: note = MG140-130 retrotransposition protein
MIGLSQLWAAFSSTAAVDTPQRIMRVCHGPLAVIDPGGDDELRRLASAEIEFGKPVNINQRLHDVFEHRTVQAISTIRKSARYRCILAKVVEDRQGAEVESDRQNEARASDSDDSLSLAIENLMKRVAELESDSSSTVRAVLAYARKSLADGDADSGIELLPPEICSPVAPRRRTCVRGTQKSRNTLAPTPPAASRRRTRVQREPQNRDQRRRQHYKLVQNLYKSNKRLAAGVILDDQPVRPVYPPIEKIDEVFRGRFSRPSPPDNADFTVCPGEEMSMSYLTPAEIQAARSSMKKDNAPGPDRNATMDTVLSLELPALEILFNVWFVLGQVPVVYKKARTILLPKSGDLSDPNNWRPITICSIFGRLYAKLLANRLSHCAALCERQKAFLPVDGCGENTVILSAVLANAHKARRPTHLAFLDLAKAFDTVPHTSIIRALRRRCLPEHFIKIVANLYTNATTSISTGLESTEELPIRSGVKQGCPLSPMLFNLVLDELIRGIGTNNGIALGDSKVAIMAFADDLILLSGSADGLQANLQVCEKFFADRSMAINARKSMSLSIVRAHGRKTMMTDEGCQWTVGGERLAAIRHTDDIKYLGVQYTAIGRSVAKFPKLEEWLRRLKAAPLKPQQRVDFVRSTISSRLIHLLRLCRVTAKMLNALDRRIRTFVKGVLHLPPGTSTDFFYLPIEKGGLGLREFRSLIPAAKLKLIGSMKGSSDPVVVEAVGHEHWLREERWCERMVSLTGMKDETLRRRVERYISSHTGQTQSGFTLLPGQSRWLERGRGLSGREYVVGCHLMSNTLPVRTRTFYGGPDRITTCRYCHNVPETTSHALQSCPKVRDAVTKRHNTILSMLRRFLTPNHDAVIREPWFRGPAGNMNPDLVVKQGRMVYVVDLTVPYDSSIGFMDGQASRKVDKYAVLVDLIKEKYQAERVEILGLAIGARGLLTQRGWSVTQKLGLSHKQTSCLAMTALKQTCGIWGLFQDR

SEQ ID NO: 275 - protein, 1094 aa, synthetic construct
  source 1..1094: note = MG140-131 retrotransposition protein
MESNTSRELGTLPPGDGRVGLGATALTVMTRTEVDHETATRPPGGRPAAEVPRAAETTNVCPNQACKRWFRTPAGLTLHRRKCQPDTLAAERLSQQPRRRNWTLEEKALIRARAFELRKADGSLPCTTLARLLIERGDSDRPIESLKRLIMAFDRDGLLAPDQTIPRETREILNESAERPLVADPLEATGTLSDATMPTDSQGPTALDDREVDVESPVAAWQRRSLETLMTWQGEEKSVLPPGDLAALSEDAITIAFEEWLKGQGWSPPAAPPRRKKLTNPVSKPFSKRKARAAMVEKTRRWFDKQPHRTVKAIVKGTFGLTDPKPAAETVEFWAKSLSTPVEVDEVHLEPMAPANYALCNLIQRCEVVAAAKTLRAKTAPGPDGLTATKVKTLPAGQLAQWFSLFLFRGFVPRRLNDARVTLIPKVAEPAGPGDYRPIAVSSVLLRLFHKILDYRLQAIPLNNDQKGFKQCDGTRDHSFLLRSLIKHVRAEKESLMVCFIDVKNAFGAISHQAVIEAARAKGVPPPMLTYLQNLYANSFLDFGDGRASVKLGAGVRQGDPISGSLFNLAVDCVRRGLDPAVGFRVGTSNVQSLLFADDSVLFASTKPGLQIQIDRFADGLKRLGMSLNAKKCATLCIHRTSLNRSAAVHVDPLPCLGFGGEKFPALSSSDTYRYLGVKVGFGGTDTSFWSEELKTRLDRLNKSYLRPQEKMFGLREVVIPGMIHSLVLSEATKGLLRRLDTQIREMVRSWLHLPKDTPLGFLHARAVDGGLGVPSLTARIPRLRSERLIKLNRPGYSEAMTAVLETPTGSKLLDSATKLHGWPEKTRRKQVKQLICGKASEFEAAKQLLWNSVDGSGLKEIGSFSSGAGGKNESKWVTDPVRYRMSGGEYVRAILVRGGLLKTGERATRGVGREGQRTCRRCRQVQSLGHIINNCPMTHGLRVARHDRFVKCLKSALENRGWKVQIEPRVKLAKGSFVKPDIVAAKGDEVVVLDPSIVGAKVPVERAQCAKKNLYDRAEVKEHGFEFAMSCGFKPKSFDVAGVIISFRGVWSLISWTLLRRLGLPVRLLNFWVIRLLNDAYYTWASELLHRAG

SEQ ID NO: 276 - protein, 968 aa, synthetic construct
  source 1..968: note = MG140-132 retrotransposition protein
MASGSTDPGPASPGNRVVSGATFFSCQECCRVFDSLRGQSQHRRQAHPDSYYDAALAGIGGRKKARWDHEESSLMAREEKRLLALGVANINMELVKCVPGRTLEAIRGHRRSSAYKEIMANIDELANDSDTSVLDVPSSPARTVPAANNIDPNISPLLFSDDEPVSERAGTGAYLQADIMDPISPPLFGDASVRERTGTVGSQAAEHGIRRALLDATARDQEWLEMSHDDFLHFRSSVRADHTGDRLQVLVDTEYDTWHAKTFHNKRERGERSKKAQARGKPKAKPRSTADGDAEGEPVAMAKRYRRPSAVKRREQYARVQSQYNINRSRCAKSVLSGDWAKEPPSLPLSVQEGFWKPLMETPSKMDLRSPVAKFEVCHDVARPVLVKEVQEALKGMNDGSPGPDGIDRTTLRGVNAKGLATHMNFWLCCGCSPTAFRDGITTLIPKSAESQQPGEYRPITVTTIVARLFHRILAKRCERHVPLSPRQKAFRRGDGLCDNIWLLRSTLQDRTRSRKPIWVTFIDVAKAFDSVSHQSMLIAARRVGVPDIVLGYVSSLYRDTVTRLKVGKTLGERIHVLRGVRQGDPLSPLLFNYVMDWILDELDPSLGISLGAGREMSLNHLAFADDVSLLAGTRRGALHLAGQFERGLGKVGLSPNAKKSATLAVVVDGKAKRWYVDHTSFLRLNGQVIPSMQITEVYKYLGTSAGIRVEQPAVKARLEKGIEHLSRAPLKPQQRMFILRVHLLPSLYHQLVLDRVTDGMLGWLDRIVRKAVRGWLRLPHDVPTGIFHSRIADGGLGLPMLVTKMRVLRKNRIAGLFRRASEGSDPVLKWYSENSATLGAEKDRWATVKYKTEVVTTTRQVDDKLARELYQTIDGGGLSQHSKVPYIHSWVGDGSRLLSGKRYIGAIQVRCNTLYTRGRAGRGRQNRDVRCETCGDYESLGHVLQTCARTWNHRNKRHDYVVDKVCE

SEQ ID NO: 277 - protein, 1211 aa, synthetic construct
  source 1..1211: note = MG140-133 retrotransposition protein
MVAKLISTRMPNKERSRDPPASGSVVLPADKSVESAPATGRQTRTAKSGSAVQLTCGNPPAGNERTKSNAASTSNPPSTDGGAVRFPSTQHREHEMDVVNVPFVCEGNTTHRCIQGQCVEEFLEFKLLAKHLQQAHRWSSTRIEAIQFVCRLCQAPWPKLASATSHHRYCKMAMGKAHAGGHGRPVRDNTVTASDFACAVDGCKFFAKNAAGLKVHKARLHPTVRNAELAMPTGRSLPWEAEEIRLLAMHELSENSARGWIGRFVSSRKLNRTTDAIRSFIRTNAYREVRDLLREEGTGPTRALAPEVNTPEVAPSEPPISVESTRSISRSRLLEQLRNLLDEEEVSECVRVYTRTAITRKDPGCGFESMLGKLIPVAETARRVTQPTQSPLPKNRKERKKAEYRSLQRLWKQDRAQLAQVVLDDMPTNVQEPPLNLVEEAFVDRFEKTSPEDVEPFEPNACDDPQGLVDFIGVTEVRLHQKKLKLRSAPGLDTWITAERLKAVSACDLAALFNTWLYLESVPQPLKAARTKLLPKSKENLGDIGQWRPITIGSQLLRLYCKILASRLQKRAHVHPMQSACQPHDGVGYNTNLLNEIMRDARTRRKSVFIVWLDIAKCFDNISHKTIERALSRFGTPQHFKNVLSDLYAGASTVIRTAHGETRPISIRSGVKQGCPLSPILFNMIVDELFRKLGSDWGYELGDHKVAAVGFADDTILVSGSQMGASKLLDETCRFFGARHLNINPKKSLGFGMVHPPKAKGKTMKILTGSLWNVAGTPIPMMGVEESTRYLGVQFGARGRKNADLTELRVWLERVKRSNLRVAQKFYLIKTNVLPRVRWRLVNGNANKMTVRRADALVREMVKQLLHLPVGTADDFLTLRVTDGGLGLSRLADSVTKGKLKLAYRLQSADDPIFRSVAERNLSSHDTRRCLRDFQLGAIDRPSDINKAAERQYMDRKEAFGNTSQGRCHQHLANNGNPWLHFDRGSLRANDFIDACKLLTEQLPTRSVVCRKAPELDQRCRGCLKEKETQKHVLQCCPITKHATMSRHNRIADYIANMVVEHGRGFRVLREPGIRKKISLTEEKLHKPDLVCISEDDEPGESKIVVIDVAVRYEDAPHVMDMVAEEKHRKYVGLTETLRTLFERPHAEVIIGSIVVGVKGALWLGNQRFLNHLFGAERKMINAEISRLAVLGSVKVWHAFIEETIGRWKRK

SEQ ID NO: 278 - protein, 1130 aa, synthetic construct
  source 1..1130: note = MG140-134 retrotransposition protein
MDGRKGLTRPLFQLVLDEILQTAAVQKTPEGAISEPGPSKPLPRANVLNTNLNMMSSNNENVPEAAAEGRYSGVAVGAATVGTSTVTPCVRCPEFNQLCKSQRGLALHRRRAHGKVPAPQALTKRRWTDTELYQLALEEIRLRDNLPAGLGLNQALQQKFPNRTVGSIKAQRRTALPRYQQALQDAERFMARRQGAPSVLSLEQVSRESEGMGIDLPEVSTELTAGDSAVGGETSQSVEAEPANVQLGEDPERRAWRSRLEESISASGIHLPGQCVEAILDPQKSKAEVRELVSAAYDAWIPARESRPRAAPGTRSNRGIGRPKPTKRALRRQNFARLQRLFKRSRKRAAAAVLDNSWESLADDLPGVSLTDQEEFWKPLFEAPSQPDPRQPDCHEVNWDLAKPVSSEEVRRVIYGPKGMKDGAPGPDGLKLRDLKRFETDKIAVHFNLWMLAGSPPDRLSEAVTILIPKELGATEPAKHRPITISSIVLRCFHSVMARRMTDGLPWAPCQRAFVPGDGVAESTLLIQQILSRARKKLKATHLAFVDIRKAFDSVSHETMLKAARRMGVPDPFLEYLGAYYERATTRLKVRGTLGVLIRLGRGVRQGCPLSGLLFNAVVDWVLSNLDPNLGMPLEAGPVGDDTRRIRCIGAAFADDLTLCGETKEGLQAQCDNLTAQFRAAGLEISAGPNGKTTSLSIEVDGKAKRWSCVSEPWLQVNGDVVPTIPLDGVQKYLGIQFSAYGCRVDVVKELEEGLENIRKAPLCPQQKLYVLTQHLIASLSHQLVLAPASAKYLEHLDRLVRKAVRGWLRMPKDTPLEAFYARTMDGGIGIPLLAKRIPILRSKRFTKMSESQTKDPVFAFLLRGYQPPPPPKFNGVAVADMRTLNEAVAENLTDRVDGRGLRPAPYVKAQHDWVNSATELVKGRSFISCLKLRLGVVSTPERNSRGRPEMDSRCDCCGRTCGVSHILQSCPRTDGSRRARHDRLKGRLAHAARKRGWTVLSEQTIPVPDAHSKRPDLILAKNGHPVYVVDVTVVSDRWEDLESAYRHKCNYYNTEVVRSFVSSRFPGAQVKHQAVAMSWRGLIHPESARLCCEALGLSKRWLSIFSLVVLEKGTSILVHWSRSTYRVTH

SEQ ID NO: 279 - protein, 958 aa, synthetic construct
  source 1..958: note = MG140-135 retrotransposition protein
MRQIHADEYNSLQLSRPRPSRMKWTLLEDAQVQIIANELWPQCATRKQLYQEVSKSIPKSTQESVRQRLLHLKWVPLSKDTEEVQPVPISCDATPISPPHPIAAPISLSSPRHSQTSGQISSVSDVMEYDDGKAALRSSALRQIESSKSTTPGRHELHVIIEQLISQPTHSSNVKAQIDEFIQRQFPHTWQPSKRRSHGQVPSMTKKQVRRAQYAQIQTLYHHRPKDAARCVLDGKWRTAFSAHAEEMPGFNDYWSGIITAPRVVDTRVSREVIPTNTDLINPISDDEVTRALNDMKGTSAGLDRLTAISLLKFGSSYWAALFNTLLSLAYLPPHLSASRLTFVPKCDDPSEPSHYRPIAVTSMITRALHKILAGRWSRLFPHDRLQFGFLQRDGAFEATSLLHAILRHAHSSSDPLAFAVLDLTKAFDNISHDSIIRSAQAFGAPPTLTSYLRSCYSSSMVCLNDRFLHPERGVRQGDPLSPLLFIMSLDEALASLPRCGINAAGTAIQTCAYADDLLLFAPSKDELLVTLEHLADNLELAGLSINSGKSKIGNILASKHPYFVALDQDPLAFRGEVIPPLLPSEEFKYLGVPFNWKGKAIQKLQEELVQMLQEISAAPLKPFQRMDLLRRFLLPRLTHSLTLGTVHKKTLRAMDRKVRASIRRWLRLPADTPVAFFHADINDGGLGVQNLSVSTILNRRLRLERFLSSSIPELHWAVRDPASLPSLKLANEQARVGEIAVESIAEAKSAWRTILLQSHDGAGLVDATRSPVSSWWLRNPGRIFPRLYIRGIQLRAGILNTKVRRSRGGRAADNVNCRGNCGHHESLPHILQRCSVTHDARCSRHNEVCRLVQTKLPTQKLTVLDEPRIPLNTTYCKPDLMLIKKNVATVIGVQICGEAQMETSFKRKISKYSQPTIQNAIESFNHISNPTLQSVFHVPIILNLRGIMHPKSAAFLN

SEQ ID NO: 280 - protein, 1246 aa, synthetic construct
  source 1..1246: note = MG140-136 retrotransposition protein
MRSKPTLTGNSTLMMIQNTDNAPCLFSGDHQRFEVAARGVSCTTPVSAAVTNRRRVRMSPDVVSIVSPNMKRQRPAHIVDLDDVSLERELNTEEEETRKEAAGSLAAEGVSPKEAQAIVDNEQLVALASQSARNERPVDVHVCFCGAAFRSARGLGQHNRHRHPLELNETRKKLLPFRKRVWEKYEDSALIRLANEIAQSNTTKRDLSYQLTAHFLGRSAEAILSRLKVLKWSNDRKQPSSIRRNLMQPGEVHSLVQSEHDTETHGPPQQPPVQIQSPVDVPPTSTVTGSQEVSCNGASRSEAFQQLSREQVSSCPSIEPAIFNAICESSTVLDWPTRGPRGDGADNEIITDHALGSAISSWPHNISTPTHSDREPEYSNWFDSFIAGVASRLREIIEDQKPQSIEPLRGQELLTVAENLLSGSLSLKRARKQLSKHASICFPHLWKPTDKSKYLRSKTLTSNRAIKRANYAAVQALYAMNRKDAAKMVLKGDWKEAYKGRGAEPRGCHAYWSEVFRSPGVRDCRPVHKISSTLWSLMEPLTTAEVTNTLASMGDKAAGLDRITLAKVKGFSRMLLTEYLNLLLVTEAAPVQLTKARITMVPKIAKPSEPADLRPIAVSSVLHRLLNKALSCRWSKSLNFNSYQVGFQPRDGCFEATLLLQTIIRTAHQTNTSLASAFVDVSKAFDTVSYDTVLRAAAAYGAPSPLVNYLRSQQNSSFVTLDGRKEVRCKRGVRQGDPLSPILFVMAMEEVLSASKPEIRFEKKDLKVHALAYADDLVVFAGNETELREKLVELERALAMAGMQINVKKSRGLTIKANKKLKHSVLMDTEYKLLNDNIPPVGTADTLKYLGLSFNWKGRVPVKHTGKLDSILTEVSQAPLKPQQRVEILRDFVVPKLLYELVLGDAHRNTLKRMDIMIRTRLRAWLRFPKDAAIAYFYVPTSEGGLGIMRLGTSVPLMAKQRLQKMLNVDNNITSVLRGTGEFRMQLRHAGRPIRVESEIVTTKVESHKAELSCLKRKLDGRDLAVPDVDPVSHLWVRYPQNVFPRLYIRSLQLRAGVLRTKVRGSRGRVQVPGTMMNCRGGCGQPESLTHILQRCQVTHDGRCARHNRVAEAVAKKAKASVEETWVEPIIPVPGSFRKPDLVFRQGNVLRVMDCAITTGERLEVMWREKVDKYSTEDCKTGIQQTLGSNYQVVHCPIILSYRGLIYRKSAAALRQLGLTSWDISDLCLLAIRGSLKEYDVYMRGT

SEQ ID NO: 281 - protein, 1073 aa, synthetic construct
  source 1..1073: note = MG140-137 retrotransposition protein
MAKREAQLMKAGAVNFNFELTRLMAGRTLESVKGQRRSEAYRGLVREYASLESSSDEVPLRMGCRVDSGAVAERLPSPVPRGFIPSTSALAGLPGLVPDTNGGEAPLRMGCHVDSGEATERLPTPVPRGFIPSTSALTSGVTPHPEEADTIATCATEEEDVWERLTSAVEQAGPSYHLNGAEFRTFLDLCCSRKEGNLGHCQALQDLIDQEYNSWVSDKYRSVPVGSRSKSWGKKIHSKTVSEEHSTAATAQSGRTSGAGVRDRRPPGRSSRVRARRYRRVQCLYGKNRSECGREVLSGNWREERAGLKLHQQQQFWSELFSAQSVHDDRSSETVFRREFSLMAPFSRFEIEKSVSGQGSGSPGIDGITRETLKSADAGDLAGHCNLWLLAGCPPSGFRQGYTVLVPKVARPQVAADHRPITISSILARAFHRCVAGRFEKTLPLGIRQKAFRTGDGLRDNVWTLRGILRERTRRCRSLCVAFIDVAKAFDSVSHESIVQSAIRIGVPAPLADYVRSLYAGGKTQLKIDNELGPAIAVGRGVRQGDPLSPLLFNFVMDRALSKLDPRLGVRLSDDVTINHLAFADDVVLLAETAGGLRELARLFEAELALVGLRPNPKKSATLQILVDGKRKKWVNGTRTILKLGDDPVAALTVEEAYRYLGTSVTLGIKRQVSSEVRLEQGLTQLSKAPLKPQQRMFILRTQLIPSLYHELSLGDRVTYGVLGRLDRSVRRAVRGWLRLPHDTPTSLFYASEVDGGLSLEELRVTVPILRRNRLDRLIGLADSSADPVIRWLVNSTSTLTKDRKRWDTVQTRGVTVGDAKQARIANGVALHDTVDGRGLRNMPDVPCVARWRTDGSSLLTGRNFIGAVQLTSATLTTRLRASRGRPDASTSCDCCGRVESLGHILQVCERTHGPRIARHNRLVELVSSKAAKLGWTVVHEPHIRTPAGIRIPDLVVYKSGESASVLDVSVVSDTADLHAEHEHKVSKYDLPEIRSYVANLSGVPTAEVGFSSVCLTWRGSLGRPSSCFLTQLGIDQRSQMLLSVRCVEEGFQIYLSFQRSTFRPALARRRVP

SEQ ID NO: 282 - protein, 1157 aa, synthetic construct
  source 1..1157: note = MG140-138 retrotransposition protein
MSGNQGSASNGSPVKGFPCPDCTLVAKSKGALASHRRWKHPVPPSVSSDELEGAVGGVPVLTPQTDGQNQGQNPVSGASGLVIGSTATGTVKGFACPNCPRSFDKSSGLSLHRRKAHASIFHAEFVPPVLTKARWCTTELTLVAREEIRLSRIAGKRATVAAIAACFPDRTFDSLKSLRRNPEYQRILSEVEERLIDDPCRTGPEDGSSQSLVSPPNVTTQARESDVGVRTPGPLSPATMTNSLADSLLSGEGASVCSAPCEQMNTLLIVLKANRQKFHLDDHSMDSLASDLATGLRSSNPALLQSLIDTEYDGWLTYLDKTYGPFKKPTLSKPGGRWIPPKIDSNCRSSKKLERRRQYREVQRLFKKNRSRCADLVLSGDWSKEPVEIPFEEQESFWGPLFETQSLPDRRRPDPISPPILELVDPISATEYSDSLKSLKDGSPGVDGMDRAYLRGIDAEDCIAHFQLWLATRTPPLAFKAGITSLIPKSADSNSPGQFRPITVSAIISRLFHRILASRLESLVPLSPRQKAFRRGDGLQDNVMILRSLIKDRCNKNRPVSLAFIDVAKAFDSVSHESLILAAERVGVPSILLDYCRNLYCGGTTSLKYGRSQSSRVISARRGVRQGDPLSPILFNFLMDWVLSALDDNLGLAINDNTRVCHLAFADDLVLLSESVDGLRTLARDFEIGLSNVGLLPNAKKSATMRILVSGKRKKWVIDPKPFLSLGGVEVPTIGIDGYYKYLGLSMTAGKPHARASDRLLDHLSQLDRAPLKPQQRMYFLKVHVLPGLNHLLVLDPVTVSQLQRLDIAVRRHVRKWLRLPHDSPNSFIHASVSDGGLGVSSLRTNIPLLKRDRIDRLISRVSTGLDPVLEAVYKTSRFLNDEIRRWSQPRSFTGRLIATKEDARNVQASSLHTSVDGRGLRFHNLVPSSNDWLTNTTSVQSGNSFIHCVQMRAASLHCAVRAARGRPGASMKCDACGELEGLSHIVQRCCRTARPRDGRHDSVVQFLAKKLLGPCEVLVEPTIPTPSGIKRPDLVVFVPGQWAKVIDVSIVSDDIHPDIAHQRKADYYSREPAVVAWVAFRTDCLVSSIDFAGAIWNWRGALSPASATVLADIGIRKSDLNILTIRVLEQGFKCWRTFKDCTWLGGRRRRRRALSG

SEQ ID NO: 283 - protein, 1125 aa, synthetic construct
  source 1..1125: note = MG140-139 retrotransposition protein
MNNHQKTCQKQRALTQQAVQIPLAVLPTAQSQPAIQEFICDQMYCAKSFPTKMGLTQHTRLMHFAVYNDALPDPTANRQVWTTQDLEKLARLRANLVPGIGPTDQARLLYPSFPGKSAEQIRAVMYTKQFRDITLDPDPTTPAIDRLEPIRPLPDQTAHSQSENTRRVDPGASTLRQVRVETVERRREESPQCPTAQSQAGSTCRVDPGASLSRIEQLALPAAIPAREPVRELVVDFGLVNSPTIVDKDPATVIRELLQELITIDHAHPLIAAANRYTRRALESNDTNTGFDEFIDAIFPPKVDFEPKLLPPTRPPPTNNHQRRIAEYKRCSRLFKKNPKRLVNQLIDGAPVTYTLPLRADVERVYLERFSVSRPDETPAEPTKQCADPDGQVSPIDIDEIRREIKTTRRNTASGPDGQVNAKRLRLIPLAVFHRIFNLWLLMQSVPQSIKPCRTTLIPKTADNLDDVNNWRPITIGSILNRLYAKVLDQRIKPDMHWTQKGFMPVDGCGEHISVLTALINQSRKNKTPLCLVFLDLAKAFDTVPHDAIRRALIRHSVHPMMAAVISDLYDNAATLIACREGNTREIPIKRGVKQGCPLSPKLFNMVMDELLSSLPDQYGVEFAGEKICNLAFADDIVLISPSVPNMARMLGLVNTFGEAHGLQLNPRKCQALRLAPVEKNKKIKIMSDTIPQWSVNNVDIPMIKADGIVKYLGAHLSPRGSMRLQVSEITDWLEKVSKARLKPQQKLILLRSYLLPRLIYRLTVSSETSSNKAHELDRKVRKTVRKFLHLPSNLHLSFFHLPVTMGGLGIPALVDVVPLQKMKFINRNIASASDATRAAIAHEFWEKQKRKIMRWLHIPLWLNQKEVKTHRLSQHHERLAALINSTQGYGYEQIGTNPHKNDWLHGYKYLRPDDFINACKLMSCTLPTRVNLYRGQPNANKQCRRCHQKPETQNHVLATCPPMARAITARHNWVCGQLAKELRANDYQVIEEPLIQIPSGDRLKPDLVVVKDNHIDIVDVQIPYENRTDNVSTSYEYKMHKYEPLLETAKLKYGAQSARVRPVIIGARGTWCARQDSTFLSWSMTSKFRRKLSLGALIGTLRVWKLFLSGLDTRPRYTNIEKVI

SEQ ID NO: 284 - protein, 1053 aa, synthetic construct
  source 1..1053: note = MG140-140 retrotransposition protein
MFPCVCGTNFADERGLETHLRRDRCRGPPTENDRVCPECGRRFDTFAGMRQHHRKAHRDQHDRQLELRYEGEAGPAREWSEEDTLRMARAEAAFTGKHINQHLQGIFPGRTVDALKYRRRKQEYKDLVEQLKNEVNQAQPGEAPLLVDPGDPPELNPFPPQQDGDPIPPDRGLHMAQNMNIIHPIWEANDPLAIAIRDFLNSAQNLTEEDLALATLLDVRDLRRGDARIAETIETYLTHIKNSCTPIGRRNRPNNIRTRTAPMRNENPNRTGRRVGQYKTYQNMFREDRARLAEVILDGVTLEEADKFPDITEVETSYRDIFDRVGPDDDAPFEAVDHRVRLDSIFTAEEVDLAFNTNKSDAAGPDGIKPSWLKKLPRHKLICLFNIILLTGYVPPEWKLNRTILIPKAGDPVEVGNWRPITISSALQRIMNKILAKRMALLPLHQNQRGFRRFDGVLANTLTLQAIIKECRAKLKPHSVLTLDLRKAFDTVSHASILRSMRRFCVSERLILLVEEGYRDTCTTVSVGGNTTGPIRVRRGVRQGDPLSPILFNLVLDELIHSLENLGSGVRMGTGTSVSCLGYADDMLILSNSIRGAQNLLGEAADFFSARGMALNHDKCTASTTSINRGNKHIYAVSRSAFSVEGVPIRQMVPSDQYKYLGRRYDLLGQTKPTLDELDGQINNIIRSPLKPQQKLVIIKSYLIPRYLDKLQSPVVTLKLLKTFDRKLRVATRRILRLNRTSQDAFLHAPVREGGVGLLCLRDYIPLILKNRMWRLGDGRDQLQTEIMNVDWIRSLSERILRWCGEKTSGSRIKIAWSDALQNGYSGNGLQQGRCHIGSGSWINRPPPFWSGADFSRAMQLRGNLLPTKGIPSNPPEERKCRAGCQRVETLCHVLQKCPMAHFCRVRRHDHLVDCLAKNLQKKGFEVETEPRIRSQDGRLRKPDIVCAKGDRVLVVELGVSWEGPDPLSVAWHNKRALYEDPGFLAALSLRYPGKLVSVTPVIVGARGTWCASNRLFVEATGYTKQEVAQVCERTLLGGIIIHRNFMKQMGPH

SEQ ID NO: 285 - protein, 1129 aa, synthetic construct
  source 1..1129: note = MG140-141 retrotransposition protein
MRAKISRATQLRGLPSLETMGIMIGVNNEGISVNGSASNSNRMTAEAPDQEVGANTNQGGAGGNDFVCDVEDCTRSFGSQRGLSQHKRLAHPVQYNASINISRKKNVWSNEETRMMAMDEARATLKEENKRLFMNQYLINIYPNRSIESIKGKRKSPVYKELVMECINEIRSETGNSTSGGSAEVSRNHLDRGIGSTDLRMAYEEDRRPGSLSETNASDIVSSGRENAGHVRLQVAANSGPAVPEQPDDQPRGEESEESVDELVMGRNNSSRIIKDAINELIRTLDTTRKTMNRKLIETVEKVLNGTDNGNSLTNWIMKWLAARPSKRVSMREKEPSRAISRKERLRMEYAHLQKLMKKNFRTAARLVLTGTKPMQCTLPAQEVRDFWKSVFEVDASEEQRNNETRPVWKRNGKLSSLWTPVTTQEIRNAELDFNSASGPDRVTVAAWRAVDVDARALIMNVFLLKQDLEQRLKNARTVLIPKVDQPTSPGELRPISITSVVVRQLHKILAKRFNKIYNFDERQRAFINCDGTLENLMLLSAILTDARRRKKELHIASLDLRKAFDSVPHHVIIDTITALGCPKPYITYVERLYQGAKTLLQYDNKGYTLSIERGVLQGDPMSPLLFNAVMDRALQGVPDEIGYELNGKRLNCLCYADDVIFIASTKLGLQRTLNIVAHKFGKLGLEVNIRKSNTLSMIPSGKQKLLKTITEPSFSINGGFLDAIGVLDVWKYLGVRFVGSKVEGAKVSCAQELKNITRARLKPQQRLRILKSALIPKYLHALVLGRVGWKQLDELDKQFRDATRGWLKMPKDVPLAYFYASCGSGGLGMPNLKQMIPLIRLNRIKNLELRWGENVGFLKNSFFYKERTEWCMGALRTLGTEPSKRSAKRYWDDELLRKVDTNDLYVCKESKASNKWIQNTSDLSGQEHVFFHHVRAGCLPSRARTARGRQSDRSCRAGCRVSETNYHVIQQCHRTHGGRILRHDKVVDMLCEQLRQNRFNVLKEPKFRTEEGLRKPDLLATKDGKTTLIDVQVVSGRNMARDHAAKRSKYSSVQGLEEKIKTRVNSREVDYEACTITYKGAIGRDTDKLLNKLRIPEQVKYRIVKSVLRGAWLNWKRFNSLTTTRGRR

SEQ ID NO: 286 - protein, 1017 aa, synthetic construct
  source 1..1017: note = MG140-142 retrotransposition protein
MKPFKCDHCEQSWTTQIGKSQHMRKAHAEQYHQSKSEQPILRRNWTAEEIHLLATDYLELEASGYPGDKPKELIRLGKSTRPYDSLRKMIQDERFRSALETARRQQRPQTPPPPPPEDPSSPSTSTSSSRRSSTSSSTSTSTSTSAPPSPPRSASPRSQPPEWSLAIKAVFSAALLASVSIDDLVPGAADLNQQYVDDDFQRWLPRLPEPKKKTWAPSPLPAGKRQRRRALYARVQQLYRKNRVRCADSVLAGTWDAEDHCLPLETQEPFWRNLFETASLPDQRLPEPVREVQWDLLKPITEAEVTSCLSSMDAKTSPGLDMYTLSKIKQLPPQQLVDRLNLWLYCSTVPSSLNEGFTSLIPKVPAPAEPALHRPITVSSILSRLYNKLLSRRFDRLCPAGVRQKAFRQGDGIAENTEILKNVIKTAKSKTRNVWIAFLDVRKAFDSVSHESLILAATRAGCPSPLLEYIKTIYANGRTRLKVGGKLSEPISVAQGVKQGDPLSCILFNLVVDWALDALDSNIGFKLGEQLLSHLAFADDVVLMSETQAGLQRQIDAFSGHLAKSGLLMNAAKCATLNITALPAQKSWVCNQTSSLRLGGVLIPALSVNETYKYLGLQVSATGVSPKVEEKLKEHLKQLTRAPLKPQQRLWILRIKVIPALYHQLVLGDPTRGYLKYLDNTIRHAVRRWTRLPHDLPIPAFYADPTDGGLGLDSMVLRVPTMKAKRLQNLVMSADPVVREVAKLDSFQREMRKWSRPVEFRGLLAATKPTRRAALAYHLHDSVDGRGLRHASLVPSAHEWVTSGTSLLDGHKFNAALGVRFNCLPTALRAARGRPNASSSCDCCGPGQLESLSHQLQSCPRTHGSRVKRHDRIVDQARRILSRLKYEVIVEPHIQTSDGLRKPDLVAHAPGKPTMVLDATVVSDMYDDPNEPHQGKVDKYNTEEIREKVTQLTGAEPGFSSICISWRGVFAPASAADLRDMGFTQADLGLLSAITVEQGATVHRIFYQSTMRTGRPL

SEQ ID NO: 287 - protein, 1234 aa, synthetic construct
  source 1..1234: note = MG140-143 retrotransposition protein
MVQSMALRYISTATQTDPLDLRVKKADIPSTPQESSDEGFNLVCLEFVNTSYRREVGFHLETIWEGLAELPEPYEILPLGLAQEDESECVQRVIEEPITPEALLRPSEDRTPPRTPVVSVPGKNPACPRCATRFTRLLGLIDPLKRNHGQKKIWFKCSKCGKQNLKYHSIACHFPRCKGEVCVAPTGDWVCEVCQRGFTTKIGLGQHKRLMHPLVRNLERIEASHPKVSSLRGAHKKVWTEEEEALLRQLVVTYAGRKNINQLIMEHIPSKTAKQISDKRRLLMKVPSKKVPSIEEGGEEGKEDLPQDAGRTKEGQLKLHYYDAIKERLAVYGFASCQEAFEKILEGQDPQMVVNEVYGKFFGSPSGPSVFGTSTRGRKAQRPQGQKASKVTTSWMRKRAEKKGKYLRFQKLFHLHRGRLARIILDNSEAVQCQIPSGIVHAAFKAKWETSVDFMGLESFPPHGEADNTVFRALITEREIGKNVNEMGKTSAPGPDGITLGHLIKKDPKFSLLMEIFNLWLVAGTIPDLLRDCRTVLIPKSSDLGRLGDINNWRPITIASTALWTFSRIVRPRLTRACPINPRQRGFIRASGCSENLKLLQLIVRHAKRERCELGVVFVDIAKAFDTVSHQHILTGLTQRGVDPHVIHLVIELYKNVSTYIGIKSEKTDPINILSGVKQGDPMSPILFNLALDPLLCKLEKNGYGFQRGNLKITAMAFADDLVLLSDSWDGMCGNIRILETFCELTGLKTQGEKCHGFYIKPTRDSYTINDCPAWTINGSPLNMIDPGNSEKYLGIRIDPWTGFADSGLAEKLEEWLHRIGDAPLKPLQKVDILRTYTISRLVYQADHTELRSGPLESLDLNIRNAVKGWLHLPPSTCDAIMYSSCKDGGLGIIKLSVLVPSIQARRLHRLAQSSDEALVTFLKGEHLEILYEKLWIRAGGEKESIPAIWEPIPVEECVASGGEGVSEWEAPVPKVRYPRPCNWRRVEFDKWKHLVAQGHGIENFENDNISNGWLIRYRGIPHRKLITALQLRANVYPTREFLARGRKDDCVRSCRHCAADYETTAHIIGNCPITQEARIKRHNSICEILSGEAKKVDWTVFQEPHIRDEYNELFKPDLIFVKGSKAFVVDVTVRFEHSSSSLKDAAAEKAKKYQCLLPQIKDLTNAAEVEFVGFPIGARGKWYAKNSELLSALGLSKTRLGKTARALASRALFASVDIVHIFVSKARSIVPPE

SEQ ID NO: 288 - protein, 1264 aa, synthetic construct
  source 1..1264: note = MG140-144 retrotransposition protein
MVLTIPSNYCDEMGRPLRVNYISVATQTSPLDLRDPVAGRATVCRGGAVEEGMNLSGLEFTNSRLYGFEGIDSSTWQERLSRLPEVYESLTSLRVGGVSDSPPRIEESEGEGEASPPGALAQPTLLTSPPILGTYPDLPTEGTPVVKVPDKNPSCPCCGNRIGKMSGLIEHLKRVHGKKNALFQCAKCGKTNVKHHSIACHYPKCKGVETSPPVGGWACEECGRTFETKIGLGQHKRSAHPAVRNIERIAASRPKECSARGVHRQCWTEEEVELLRRLDKQYEGSKNINKLIAEHIPSKSAKQISDKRRGLHKSPVKRREKDQEKQKYLESEGLHLPGIESRVDGGLRSHYRKVISDWVTSDKLTVLRGMFEEVIEGEKDLSTLVDEATQDRCACLFFKSHELKAVQGGRPKVTRRVPSSEPPKVWMKKRAKKRGHFLRFQRLFYLDRGKLAGIILDNVESLRCGIPLDEVHAVFKSRWEMSGTFKGLGAFVTEGQADNSAFQAMITAKEISKNINEMNKNAAPGPDGLSLRDLIKTDPHYTQLMELFNLWLATGVIPDVVKECRTVLISKSALPERQKDINNWRPITIGSIILRLFSRILTVRLSKACPINTRQRGFIKSSGCAENLKLLQLLIRSAKREHRPLGVVFVDLAKAFDTVSHEHIIMALRQKGVDDHIVSLITNMYLNVNTRIHLKNDQTDPIRICIGVKQGDPMSPILFNLSIDPLLCKLESEGSGFQHYAKKVTSMAFADDLVLLSGSWEGMKDNITILEAFCELTGLKTQGEKCHGFFIQPTKDSYTINDCPHWTINGTPINMIEPGSSEKYLGVRVDPWIGISKPELLEKLQGWLHQIHSSPLKPMQKVDILKGYMLPRLFYLADQTDVKATYLETLDLAIRSAVKEWLHLPPSTCDALLYSSTKDGGLGITRLLGLIPSVQVRRLHRIAQSSDEITREVARNEGIEKEFQKLWVTAGGDKNKIPSIWDPKTVMVISKELGGEEPASEWEVPAPKTIFPRPCDWRRQEFINWTKLLSQGRGISNFEKDKISNNWIEHYRGIPHRKIITALQLRANVYPTREFLARGRKDQQSTSCRHCGADNETCAHIIGYCPAVQDARIKRRNYLGELLISEAKKEWVVFQEPLLRDNNNELYKPDLVFVKGDQALVVDITVRYESKPTSLADAAAEKVKKYQHLLNQVQELTNATRIKFMGFPLGARGKWHQGNYELLADLGLSSSRREKVARRLSNRALLTSVDIIHIFASKSRTVTS

SEQ ID NO: 289 - protein, 1270 aa, synthetic construct
  source 1..1270: note = MG140-145 retrotransposition protein
MSRSVYPHPKLVKMGRPMRIAFVSVATQTGPMDLREKVTTELGKEHDKDDVPENSWNWDGLEFINSIADGLEWSHPSNWAERLAMFPEVYETYNSLCAAEKENDRTGELTSQMAMSPPRTPSPDPNADLPNRGTPVVKVPDKNTSCPCCGNRIGKISQLVEHLKRVHGNKKILFQCAKCGRTEMKHHSIACHFPKCKGSVTTDPECKGSITTDPTVGFTCEECGRVFTSKIGLGQHKRLAHPVLRNIERIAAAHPKASTKRGLHRQCWTEEEVELLRILDKQYEGCKNINKLIAEHIPSKTTKQISDKRRGLGKSPEEEREKDQDLEWRKLMTKEQEHPRGTGSSTEEGPMSQYKNRIMEWITSEKLPILQGVFEKVLNGEENIDCLIEEAVDEYYPHLFRRSAELETSQDQKRPRPSKANPPGPSTEWMKKRAKKRGQFLRFQRLFYRDRGKLAGIILDDVESLQCGIPLEEVHEVFKSRWETPGTFKGLGAFRSAGQADNSAFKAMITAKEIAKNIREMNKKAAPGPDGLSLRDLIKIDPHYTQVMELFNLWLLSGNIPDVARECRTVLISKSALPERQKDINNWRPITIGSTALRLFSRILTARLTKACPINPRQRGFIKSPGCAENLKLLQLLIRSAKKEHRPLGVVFVDLAKAFDTVSHSHILTVLKQKGVDEHIIKLIKNLYHNINTRIDLKNKQSEPIGMQIGVKQGDPMSPILFNLSVDPLLCKLEEEGSGVQYGSKNITTMAFADDLVLLSESWEGMKKNIEILEVFCELTGLKTQGEKCHGFFIQPTKDSYTINNCPPWTVNGTPLNMIEPGSSEKYLGLRIDPWTGISKPELLQKVKGWLQRINDAALKPFQKVDILKGYTIPRLIYLADQADVKTTYLETLDLEIRTAVKEWLHLPSCTCDAILYSSTRDGGLGITRLTGLIPSVQARRLHRIAQSSDETTREIAKKEGIEKEYARLWIAAGGNKEKIPPIWDPTTVRVISEGQGGEKQVSEWELPAPKTIFPKPCDWRNQEFTNWTKLISQGRGISNFESDKISNSWLEFHRGIPHRKLLTALQLRANVYPTREFLTRGQQGTLMRACRHCQAEAETCAHIIGYCPAVQDARIKRHNQICEMLMEEAKKKEWTVFQEPHIHDEHNELYKPDLVFVKENQAIVVDVTIRYESKSTSMADAAAEKVRKYQHLTDHIQDLTKASNIKFMGFPLGARGKWHPGNYELLKEPGLSSSRQDKVARRLSNRALFSSVDIIHIFASKTRTITRSA

SEQ ID NO: 290 - protein, 1039 aa, synthetic construct
  source 1..1039: note = MG140-146 retrotransposition protein
MDHNNIKKGRQEGSCSPAGAISFSSGLLSQYPCKYCTKLFSSRQALNGHLRVHAELRRFLEPPSELVSTSGRMKWSAEETAYCVRAYRMLSHEECVPTEVHKKLLEWGYSRSYESVRKFLRTKKFADELERSTKTTVTHVVAEEVVSHDDNSAVNGASDLEGVLPTLRSLMESQVDKVGQLEQQINVVVESILAGETSKESLSELTSNLLENWAAKFAPKRKIRKLNKNLESCQKKMSSRARKAMMYKFDRQAWNKDRSRTANRILNGPVQGCKRPDEIPEFLPYWSKTFEKFESSGVNAVNMTLIRDSYQIWSGISLGEVKVAVSGMKSRTASGPDGISCEELKAQHPRVLCKLVNTFIYLGGVPSILKRSRVTFIPKKDNASSPRDYRPISVTSVILRLFNKILAKRVIDSAQFDHRQRAFRPVDGCAENVMAIEGVLNDARKMHRSVYMASLDMSNAYSSVSHEALLKALESNGACRGLLGYIEDLYSGFTTLLSDGGKEQSVQVERGVMQGDPSSPVLFNMVIDQLLNHIPEEGGYQIAEGVRMNGCAFADDLNIIAATPPGLRMALTEIEVNGRPWGLEFNEKKCSYLAVRAIRGKETVVETDHVFNINNKPIPATEATDIWKYLGAYFSADGLQDAPDMLSVWLERLKGAKFLKPQEKIYVLRVHIIPRLIHRLRMSNLSASKLNSMDRKIRAAINGTQGFAHLSSRTPIHFYYAPGKSGGLGLMRLRHSVPAMVLGRFGALKDSQDNVLKTIANLSANVLRCKKAESLLVQFGDVRSSGVELLVGRSRGQISEINRFSLVESTVSGRGLKHAGEVPQVHSWVTNGSTAFFTGREYCDALSLRLDALHCRVRACRINRTSNFTCRAGCPEAENNYHQIQRCIRSHGMRMRRHKTIVDALVKKLLQMGFEVRKEECFKTSEGNRFPDVVAVKNGKVFVIDPSIVGDTLDPNVWHDAKKNKYETCLKDILQAQYPDHDIFFGGLAITYKGVLASKSAQYLREVGLSNGFLKLVTMMTIRGSLLCHWATQASTIVK

SEQ ID NO: 291 - protein, 1005 aa, synthetic construct
  source 1..1005: note = MG140-147 retrotransposition protein
MRTKHPQAYEESKKVANIRIAWSNDEDNILANLEISLKSTQKGQILERLFNEWNKLVVQSHANYRSKDAIRARRQQQEYKAILRDLIQKQDDTNASSDDNDSSTDSDSPSIPATICNDMNAIHKLLNDIVIAGHIKLSDHMKNAIDAFLNPNKAIDPVKLTMSGINQSITDIRNKNNNNRNSSRVNGTATAINKKPARNKSRIEKSKQHAYYQRLYLKNKSRLMDEIIDGVAPNVDPPPIHTAIQYYEQIWSILVQDTHPVTTKPDFNNKDNTLLSPITKVEIQWAIKKTKRDSAKGVDQITLQEAKLLAEDDLYIAFNIWLGCKTIPSDLKLNRTTLIPKGKQGLDMITNWRPITISSILLRLFNKIIACRMNKYFEIDKRQLGFRPINGCSMNILWLHHLLKHARLNRRDLYVCLIDVAKAFDSVPHESIFRALVRHHAPSSFVELVRNQYADSYTSITYKNLSSKRIKILRGVKQGDSLSPLLFNLVTDELFGILKDQLGYNITNIGSSNIKCFADDICLISGSRIGMGHMISETVSFLNDRNLQVNANKCMSIGLQKGFKGKKSKIVTEPIFTINGSLIPILGHVENHTKYLGIQFTSVGMVNANVAKDRIIMVLNKLQKIPLKPQQKIDLIRSHVIPLFIYQLINLENYPKLLKEIDILIRRAIRSILHLNIGLSIEFFYLPIRDGGLQIPLLRDIVGLAKVRIYKYIMRSDDELLKHLVQKQAFPILHRFINELKLDSSYETSDIKLRKIQLVKDRRVSYAGKVHGYGSEVFSTCPSTNFWLYGDNKTVTGRTYINGIKLRTNTLETRVTVTRGCMVDKTCRMCKEENESLMHILQFCKTTKGLRYARHNSVCARVVKKLKERGFQVYVEQAYTTDETGLPTLLRPDIIAVKLDHAYVLDVQAVYESSGASFINAYKFKVDKYTPLIQAIKNRHKCKDVTIHGLIIGSRASFHHGHIRIWNEFGFSSSELKYMALNCLENSLRIWSTFNFNRLNSFNRS

SEQ ID NO: 292 - protein, 1187 aa, synthetic construct
  source 1..1187: note = MG146-1 retrotransposition protein
MTSSQSCSQPVCSRSKPSDTTVLSDFQSQPTRKRASAKQKDSQSSETRSCVSKKDTTLWNDDLVSQLLEIRKMVVPDPNCKVAPYGSWKRIHQIWKERKLPNMTEQQLRQKWTQLNRKKNVDKLVNQTEEMNSEVHNLDENEKIRMSDLYKKLEPLIIDPNNFTLPIESRTSTRMKRIPSSSDLKVLNLLFSDLYPRIENLFHDKLLAIDTLLYTIVHKYKSIKEPMQQAIYDKKEQDLINAIKNITRKLRPLYAAMHRMRNGVKETSQKIVQQIVEEYKTFDLKSLTTKIGMMKQERNRYKRILSEYKKRKKFFRTNEMFMVNEKKFYSMIENRNKTKRETPDEKEVVQFWSSIWERKKSCNLDTAWIKEISKKLEEKLSLVDKENTRNSRKLKTKTANNLKQVNSIFNLNISHIFKSIHKKKNWSAPGPDMICNYWWKYIDSTWPKLLEAFQQMLNNTVPIPEWFCAGVTYRIPKQGPPCEANIRPITCLNTVYKMFTSIVLSYLSAYLDQHNLMTIEQRGAKKGVWGTYENLLIDEIISQDANKHRNKSFSAAWLDITKAYDSIPHEWIMKCLEIHKVPNEIKAVIRQLMEKWSTRIYYDFQKKTRTIQIKNGIFQGDSLCPFLFCLALNPISILIKSWNCGYKLNSADMVITHSMFIDDIKLYSTTQDKMNGILSLLKSALSDIGLSINDKKSGTLIRCKGMISEQGVKLQDGTSFPAITKTNLYRYLGFMQSLGIDKEKNKEMVINEFKERVERLVNSSLSGFHLARAYNTYCIGYLRYFFFMKWNYYELNRMEQILKKSLKQKGLFFRGFPVALFHLPRDKGGRGFQSVFMEYLIYRIGLAFKFHKSPHMERITNLLRDKDCDSFYNDTLTYGKEFGLQFEFQKNQNIIIKDSETKEELNISSKKKLTQLLRDRANKKWLTEAEEGGMHFKFWNMYKERLSWIKNWRFITKQCENMLWMAMTANLQTRSLTKWYNTQHSNGLKQQNNIKCRLCGKANETTEHIVSGCSALMNSDIIPRHNSVLYHLLRMILDRNGIQHNGTVQMEYSTDKVRIQCNCKILTIREVEHNVPDLVVYLHERKQIQIIDIAVPYDDNLEMRYNEKIQKYGPLQIELQKLNPGYKATVIPIVIGAFGVTLPSFQENLKKVLGENCLYEAKKLIRAAISGTFLILTKWESRAKIVD

SEQ ID NO: 293 - protein, 1048 aa, synthetic construct
  source 1..1048: note = MG146-2 retrotransposition protein
MLEIYEQEKEGGRGIGPRLLKKWRNKYKDDNYDGKKLLCQVKKLTEREWLKPVKPQERRKEKRNKYRPPDPKGRTEDANDYEQKVMTWIEREPNPKEVVKRRKTVPYWIVNPAIEILGREIKSGKLDTLEKALDRLAHLRTLADDLANKEDKATKRTNDKRGYRNIIRDLYVKLTLVKKLHTKLVHERIEIELRKLFKLGSKKELTKKWKDTKILEIRNLITQTKKKAKNLKLFAKTSKIDPNKVVQKQNKTANPQELLKKSTEFWTEIWGKPQDSTSREIKQVLKPVGEIATGRPLKGIWKDFGEEEILKATKKKKNFSAPGPDGISNYWLKEAKHKLTPLIAKELDKWANEKPLNLTRYTEGRTVLIIKDNKQSPEDPGNYRPITCLNTIYKWITSILLARLNEECERRGIIDPNQRGAKKGTWGTVVNNRIDREVTKKYKKSIYQMWIDFKKAFDSISHKYLWKCIKKSIGKSTRRLWMNIVRNWKTKLEIDGEKSEFILFKRGIYQGDSLCPALFVLCLNPLSIMLSRSKGVQLDDGKVTHSLYIDDLKLYEMEYETIREQYRLTKKTGKIIGLVPNPAKCGICGPIKYKSVDHDVIPRVTTENNYKYLGIREDDGILIKETIVAAAKKFQTELTRIWRSKASSWNKVNATNVKANALVKYIMFNVDISWDLIERWATTQRVIIRAAAEIEKTTTNVAMHGPRCKGYLGIEDLECLYIKAKMAVVLHLAKNTTENKKHAIYDSIEKEARKALTKINVKLENGTLTYGGEGYPLVIKDKCKELLANAFWNKWTSERKEQKWTGKFDNKVGYKNLYWPMNRNLSQPLINDIIEMREDNKPHKANLLRRKLALDKFCRHCGYENENQEHIAVGCTKYLKYYTRRHNKVVKKIAYEIIVKGGSIKDYIGLNANNVQVRGRYKAGKGEILLEPVYWLEEENKYQKPDLIWVDHENKCVSILEVGITWDSRIGEKKREKANKYETILPILRKQYRGYKIKNEPIIIGALGTISDDLKEWLETKLKTEIVAKKLQLEVIRSTLEITKNFLN

SEQ ID NO: 294 - protein, 978 aa, synthetic construct
  source 1..978: note = MG148-13 reverse transcriptase
MDNCNIITYNMHGFNQGAELVKSYCSNALSDFMLLQELWLSSDSLYKLDNIAHGYSCFSVSSMDSVLENGLLRGRPFGGLAILVRENHRNLCSLLASNERLIAVVYNDILIINVYFPCSSRLNYKDETLDLLVQIEELLGCFVGDKVVIGGDLNCTLEIESWSSKLIRGFIDDHNFISCNNLPIDVTGTVYTYSNEVLGHYSYLDYFVVSNNLSLSIVSLKIGCDELNLSDHSPVSMEAKNIINVDYKKSNSSCNKGDLIPETCYHNRWDHADTVGYYESTRVGLQPVLEDLRSCLTNLKTVNVSNTKQRMKESIDSVYITILAVLNDAAYRHVPRIKANILKFWWDQELSDLKSKAMASNKVWIEVGRPRSGYIFDVRKADKYKYKSLIKRKQLEIRNNITNDLHDALVQKDTEDFWKVWKSKFPNKKVNKFPLIDGSSDPNIIANKFVDFFSNVCTSEPLAYKNANNDFLNRLQDFRGDSTSNTDTVSVELLEEVLESMSRGKAAGLDNLTIEHIQFAHPIIITILKELFNCFLEVGMVPDGFRDGLAIPLPKNDNASHNVNVDNFRCITISPVISKLFEHCLLRLFSKYFHSNDAQFGFKKKLGCSHAIYSVKQVVDYYVRGGSTVNICTIDISKAFDKVNLFILLGKLMDRNIPNCVIMVLFDWFTNSYITVKWLNVLSLRCQVNSGVRQGGVMSPVLFAIYVDEILDKLNNSGLGCNVKGLTVNSFMYADDLIILSASVTHLQKLINICVDELKSIQLSVNAKKCFCMRIGKRYAVSCNSVVIDNYHVQWTNEIRYLGVYFTAGHLLKFNFVPYKRRFYRCLNCILNKTGIKAINVVLSLTQSYCVPFLLYSVESTNLTATEKLRLASPFKMLFSRLFNSFDAQTITYCQYYTGYLTLEFVIDQRRLKFLNNICNLNNVVIHSLFRLNGATEISSLIAKSRMIAKYNTNMFDIKSIKYSMWNSFILVNNLGVK

SEQ ID NO: 295 - protein, 745 aa, synthetic construct
  source 1..745: note = MG148-14 reverse transcriptase
DLNLSDHSPVRIDLSNIISTNCKYPNTEKPYTKSCYQNRWDQADVVGYYESTRLGLEPILTYLRSFSKYSGTPNDSDAIRECIDSTYNSIISVLNNAAYQHVPRVKANVLKFWWDQELRELKDKAIASNKVWIEAGRPRNGLIFETRKGDKYKYKSLIKRKQLETRENITNDLHEALLNKDNDGFWKTWKSKFPPKKTNKYSLIDGSTDPSEIAEKFGNYFSSICTSETSVYNSSKNVFLERLGEYIGYGDHNNDYITSVELLEEVFESINNGKAAGLDSLTIEHIKFAHPIIVTILKELFNYLLEYGVVPEGFRNGLAIPLPKDDISGSKIGVKIENFRCITISPVISKLFEHCMLRLFSKYLQSNDAQFGFKKKIGCSHAIYSLKQVVDYYVRGGSTVNLCTLDISKAFDKVNLFVLLGKLMDRKSPNCLINVLFDWFSHNFITVKWLNVLSSSFQVNLGVRQGGAMSPVLFAIYVDDLLVKLNSSRLGCTVKGLTVNAFMYADDLIILSASVTDLQRLINICVDSLTTIQLSINAKKCFCMRIGKRFSVDCNNVIIDNYPIQWCSTIRYLGVYLMSGHVIKFNLDYCKKRFYRCLNSILSKTGTKVIDILLSLTHSYCIPVLLYATESMSLTVTEKQRLASPFQRLYFKIFSTFDPQTIAYCQYYTGYLPLNYTIDLKCLKFLTNIANTTNVFLNLLFSLNGTTSIKNVCAKYNTNKMDLISVKNAMWNVFIQVNMLNFCSS

SEQ ID NO: 296 - protein, 976 aa, synthetic construct
  source 1..976: note = MG148-15 reverse transcriptase
MMQMMQLIMFMQLTLFKMAEKLTIISYNLHGLNQGKPGIDEIISKIEPDLIMVQEHWLAPDNLGKLNSLSSKYFVFGSSAMNLVVSSGPLCGRPFGGTAILINNYHVSSVVCITTSDRFTAIKLYNWLFITVYMPCVGTAQRDELYLNILADLQAIISDHSECHCFIGGDFNIDLNSQSNSNISLTVNEFSEYHSLSRCDELFSVGNKNTYINESNNTSSTIDYMLATDCDRIIAFNVLDIDINLSDHVPILAICACDVSPIPLCEATKSKCSAKVSHLRWDHAPLELYYEHTRQLCEPVLNSLISLIACRPADAATDAFIVDSVDQCYTSLVNILRESANLFIPKHQKNYYKFWWSQELELLKQNAIASCRAWKDASKPKHGVLFFKYKQDKLLYKSRIREEKAREHLSYTNNLHGALLDKSGPNFWKVWKSKFENNSTKVIQVDGTADNALIADKFAKYFESNCTPFSAVRNEELKIEYNHRRSSYNGSPIIFSQLFDVELLSNLIDKMDNGKAAGLDDLSSEHLKYCHPIVICLLVKLFNLFITLAHVPDSFGKSYSVPIPKCDGHTRALSVDDFRGISISPIISKVFELAILDKFSRYFTTSDHQFGFKKRVSCRHAIYCVRNVIEDFINNGSTVNMCALDLSKAFDRMNHYALLNKLMDRYLPIEILSIMESWFSFSVTCIKWVSHVSPFFTLLAGVRQGGVLSPVLFSIFIDDLILKVIKTNLGCHISNNCVSIFLFADDILLLSPTITGLQSLFNTCERELEKVDMRVNAKKSMCVRFGLRFDAPCIELNSIHGDSLKWVSNCRYLGVHFTSGRVFRCSYDSAKSSFFRAFNAIYSKVGQTASEETVLALLRSKCLPVLLYATEACPMLVRDQKSLEFTVTRVFMKIFRTGSSTVIAECQRNFNFLSIQRQLTIRTAKFLQAFTASDNQLCVLFKSNATHQLNIILSSVSVESIGQLISVLYDQLYCLQ

SEQ ID NO: 297 - protein, 972 aa, synthetic construct
  source 1..972: note = MG148-16 reverse transcriptase
MDNCNIITYNMHGFNQGAELLKSYCSNALSDFMLLQELWLSSDSLYKLDTIAQGYSCFSVSSMDSVLENGLLRGRPFGGLAILVRENHRNLCSLLDSNERLIAVVYNDILIINVYFPCSSRLNYKDETLDLLVQIEELLDRFVGDKVIIGGDLNCTLEIESWSSNLIRGFSDDHNFISCNNLPIDVTGTEYTYSNEVLGHYSYLDYFVVSSNLSSSILSLKIGCDELNLSDRSPVSMEAKNINNVDYKKSNSNSNKGDQISETCYHNRWDHADIVGYYKSTGVGLQPVLEDLRTCLTNFKSVNVSNTKQRMKDSIDSAYNTILAVLNDAAYRHVPRIKANVLNFWWDQELSDLKSKAMASNKLWIEAGRPRSGYIFDVRKADKYKYKCLIKRKQLEIRNNITNNLHDALVQKDTEDFWKVWKSKFPNKKVNKFPLIDGSSDPNIIANKFADYFSNVCTSEPLAYKTANNDFLNRLQDYMGDSTSNKDIVSVELLEEVLESMSRGKAAGLDNITIEHIQFAHPIIITILKELFNCFLEVRMVPDGFRDGLAIPLPKNDNASHNVNVDNFRCITISPVISKLFEHCLLRLFSKYFHSNDAQLGFKKKLGCSHAIYSVKQVVDYYVRGGSTVNICTIDISKAFDKVNLFILLGKLMDRNIPNCVINVLFDWFAKSYITVKWLNVLSLRCQVNSGVRQGGVMSPVLFAIYVDEILVKLNNSGLGCNVKGLTVNSFMYADDLIILSASVTHLQKLINICVDELNSIQLSVNAKKCFCMRIGKRYAVSCKSVVIDNYHVQWTNEIRYLGVYFTAGHLLKFNFVPYKRRFFRCLNCILSKTGTKAINVVLSLTQSYCVPFLLYAVESTSLTATEKLRLASPFKRLFSRLFNSFDAQTIAYCQYYTGYLPLEFVIDQRRLKFLNNICNLNNVVIQSLFRLNGDTEISSLVAKYNTNMFDIKSINYSMWNSFIIMNNLSVE

SEQ ID NO: 298 - protein, 416 aa, synthetic construct
  source 1..416: note = MG148-17 reverse transcriptase
GPVRHRCTWWWSEDVRAAVEEKRLAYRKWLQSRLDEDLARYRVARRKAKRCVAKAQAGEREKWRASLSEPAGQKRVFAMARRMAREGRDVSGVPCVRAESGRVIVEGDEMKEVWARYWSRLLNEENPWDGGQGSAPVEGPELSVSASEIEFALRAMKRGKAAGPSGLVAEMLVAGGPFLNGWFTSLCDLIWRTGEIREDWALSVLVPVFKGKGDPLSCGSYRPIKLMEHGMKVMERVLERRLRAVVSVDGMQCGFMSGKSTTDAIFLVRQLQEKYLDKRRSLWCMFVDLEKAYDRVPRELVRWALRLKGVTEELVRVVMPMYVGSHSLVRTSVGETRSFDVGVGLHQGSVLSPLLFAVVMDEVVREVKVGMPWEVLFADDLVLLAQTRELFARYRAWKNAMMGSGLKVNVVKTKVV

SEQ ID NO: 299 - protein, 740 aa, synthetic construct
  source 1..740: note = MG148-18 reverse transcriptase
MREEMEKFQQLTFMTMDANKLQIVSYNCKNFHTDGDKFIFVNSLFSNTQFLLLQETWLYESEFKKLLNIGINSEHIATSAMNESKHRIGRKFGGTAIVWESSIKGKITKIDLQHERICALLFTKDQYSILIANVYMPCDNHAGDEEYTNVLNVISQCLYKYNPSHIIIGGDMNVDFVRNSPNTHILFDFITDFKLVKCIDFPCASVPYTYINHSGMTSRIDHFFISESLKKSITYCDIVDNHLYSDHVPLRVVLDIDIQHIIDVRERPFTIKKAWHRANDQDIVKYKDNLDSLLSDLVIHDSILHCNNYNCLLHREELCTLYEAVINACIKASEHIPNTSGSARKVKPGWNDEVKCLREDALSWHHFWNINGRPRDGYVAEMHRITRARYHRSIRQLKRDHDKLRMEKMADSLLSDNSRDMWAEIRKMKGNSSKMACSIDGCYDNDEIVNVFSDKYMSLYNSVPFDSDEMCSIKSEISARIDKCNHGYSISTEDIVNAVTHLKCGKSDGAEGLYSDHFIHGTGRFYVILSLLFTLFLSHGFSPESMIIGTMIPIPKDKKKSLSNSSNYRAIALSSIFSKILDWIILIKEQKSLFSSELQFGFKKGLSTTQCTNSMLETIDYYNFNKSSVYVLLLDANKAFDRVNYCKLFDELLKRDLSPLVLRLLLYMYTNQTLRVRWGHTMSDSFGVSNGVKQGDVLSPLLFAIYTDGLLVRLQETGVGCHMGHRFSGALANADDLTLL

SEQ ID NO: 300 - protein, 977 aa, synthetic construct
  source 1..977: note = MG148-19 reverse transcriptase
HFHDSGENLTFIDTLMCDTNFLFLQELCLYENEFEKLLNLSNNCDFTATSAMDEKVHRIGRPFGGTAIIWNSSITGHINKVECDNNRICGLLYIMNNVTMMLLNIYMPCDKYTDDFEFIDVLNTISQLLHKHNPSHVVIGGDMNVDFIRTSPNTRVLSDFITDFNLYTCIDLPDSNVPYTFINHNNNTSRIDHFLVCESLKDAISDCYIVDNHLFSDHVPLNICFNLDVTYIAEVERPFTIKQAWYKATDFDIEKYKKRLDGLLENIIVNDSMLYCSDYNCIDHKEELCELYNTVINTCITASDHIPTTSNRTKIKPGWNDNVKQLKEDALSWHHFWKINNRPRAGYVAEMHRISRARYHRAIRHIDRNASKIKSEKIAEAMLSNNSRDMWSEVKKMKGRNSKLTCSIDDCSDSNDIANIFSSKYMELYNSVPYDVDEMKKIESRIMDRIDDCSDDNYSISVRDVIDAVARLKHSKSDGSEGLFSDHFIYGTNRLFVILSLLYSLFLSHGFSPDSMILGTMIPIPKNKKKSLSHSSNYRAIALSSIFSKIFDWIILIKEHSSLCSSDLQFGFKKDTSTTQCSYSMLETIDYYNFNRSNVYVLMLDASKAFDRVNYCKLFNELLKRDISPLVLRLLLYMYTSQCLRVKWGHTLSDCFTVKNGVKQGGVLSPILFAIYTDGMLQKLESTGVGCHMGSHFTGALAYADDITLLSPSISGLKILIEVCEQYARDFDILFNGNKSQLLFYRGRGCVSCYKDIVVNEQCVKYSNSAVHLGHVISPDDKDCILRNAKANFWKKFNIFMSDFGNLSCYVKSKLFQQYCCSMYGSPLWSLRGSAVQSLCVAWRKALRSLWRVSPRTHCDLITALSFQIPLHSNLTKRFAKFIIKCLGSENRIVNIISHIAIRNPLSCAGNNYRDLLDRNSEVDFKTLLFNWNERADTIENLVRTLHELIEMRDGLKECIGLTFDEIELFITDICIH

SEQ ID NO: 301 - protein, 975 aa, synthetic construct
  source 1..975: note = MG148-20 reverse transcriptase
MSLTMPANNNLFNFTTVVCNTDVTSKLVIISYNLHGLNQGLHGLRELISKCNPDVLCTQEHWLTPANLYKLKSISSAYSAYGSSAMSDTVSRGPLVGRPFGGTAILVKKKFDSATSNIVCRDRVTSICILDWLIVNVYMPCAGTVDQLLLYSDTIDYIDSVLFECPGHNICMAGDMNTDLNVFSPISDLVNNFLLRNKLHRCDILFPVSLKYTYMNESLNCSSTIDYMFTSSVYVTVAYNIVDLDVNLSDHVPLISVCLCRPLVQSRDDTIKCPVDVEHFRWDHAPTHLYYEQTRMLLQPILDDVNFLLCTNDTDGKFEINSTNIIYDKIVQALQESANKFIPKRRKNFYKYWWNQELDELKDKAIASCKLWKEARKPRSGPISVKYKQDKSNYKLGIKRAQNADVSFYSNELHDALMRKNGREFWKVWNSKFTKSSDGHLLVDGLSDCAKIANKFADHFKMVCQPFSEKRSTELKAMYDSARANYVGQSIIDDQRVFDVQLISEKIMQMKSGKAAGLDKLSAEHLMYCHPIISVILCKLFNICMLSGHVPSGFGASYTVPIPKVEKSCRSLTVDDFRGISISPVISKVFELCLLDRYQDHLITSDHQFGFKHSIGCRHVIYNVRKTVDHYVNNGSTVNICSIDLSKAFDRMNHYALFLKLIKRGIPLALLSVMEYWFKLSVTCVRWCGYESPFFRLLAGVRQGGVLSPLLFSIFIDDIVYRVISTKVGCYISHVCVSIFLFADDILLLAPTLFGLQKLLSACEDELEFIDMHLNAVKSVCMRVGARFDASCASIYTHLGVALKWVETCKYLGVYMVSSKTFNCVFDEAKRKFFRAFNALYGRVGRSASDEVVVSLIKAKCLPIMLYGAEVCHLTKYQIRSFDFSINRLFMKIFKTGSISVVHECQVNFNFISVGYLIDIRESKFLYDFSNVNNYICQLFTKHANYRLSELYSLYGVSTVGQLRVAAQIAFASDC

SEQ ID NO: 302 - protein, 330 aa, synthetic construct
  source 1..330: note = MG148-21 reverse transcriptase
NGKAAGLDGITSEHLKNNHPCLVVILCKLFNLFILTGRFPVSFATSYTVPIPKCDARSKSLEVNDFRGISISPVISKLFELCVLERYCDYFATSDHQFGFKKNLSCSHVIYSVRTVVENFISNGSTVNLCCLDLSKAFDRMNHYALFIKLIKRKFPLEILKLLEYWFCMSKTCVRWDGQMSYFFAIVAGVRQGGVLSPVLFSIFIDDIVHKVKSANVGCYLSNVCVSIFLYADDILLIAPTVTGLQTLLTVCEQELFELDMKLNVTKSVCIRFGEKFDSLCSDVVSAQGGKLLWVDSCRYLGVYFTSGRVFRCCFHNAKCSFFLSFNAIF

SEQ ID NO: 303 - protein, 958 aa, synthetic construct
  source 1..958: note = MG148-22 reverse transcriptase
MDNCNIITYNMHGFNQGAELVKSYCSNALSDFMLLQELWLSSDSLYKLDNIAHGYSCFSVSSMDSVLENGLLRGRPFGGLAILVRENHRNLCSLLASNERLIAVVYNDILIINVYFPCSSRLNYKDETLDLLVQIEELLGCFVGDKVVIGGDLNCTLEIESWSSKLIRGFIDDHNFISCNNLPIDVTGTVYTYSNEVLGHYSYLDYFVVSSNLSLSIVSLKIGCDELNLSDHSPVSMEAKNIINVDYKKSNSSCNKGDLIPETCYHNRWDHADTVGYYESTRVGLQPVLEDLRSCLTNLKTVNVSNTKQRMKESIDSVYITILAVLNDAAYRHVPRIKANILKFWWDQELSDLKSKAMASNKVWIEVGRPRSGYIFDVRKADKYKYKSLIKRKQLEIRNNITNDLHDALVQKDTEDFWKVWKSKFPNKKVNKFPLIDGSSDPNIIANKFVDFFSNVCTSEPLAYKNANNDFLNRLQDFRGDSTSNTDTVSVELLEEVLESMSRGKAAGLDNLTIEHIQFAHPIIITILKELFNCFLEVGMVPDGFRDGLAIPLPKNDNASHNVNVDNFRCITISPVISKLFEHCLLRLFSKYFHSNDAQFGFKKKLGCSHAIYSVKQVVDYYVRGGSTVNICTIDISKAFDKVNLFILLGKLMDRNIPNCVIMVLFDWFTNSYITVKWLNVLSLRCQVNSGVRQGGVMSPVLFAIYVDEILDKLNNSGLGCNVKGLTVNSFMYADDLIILSASVTHLQKLINICVDELKSIQLSVNAKKCFCMRIGKRYAVSCNSVVIDNYHVQWTNEIRYLGVYFTAGHLLKFNFVPYKRRFYRCLNCILNKTGIKAINVVLSLTQSYCVPFLLYSVESTNLTATEKLRLASPFKMLFSRLFNSFDAQTIAYCQYYTGYLPLEFVIDQRRLKFLNNICNLNNVVIHSLFRLNGATEISSLITKSRMIAKYNTNMFDI

SEQ ID NO: 304 - protein, 840 aa, synthetic construct
  source 1..840: note = MG148-23 reverse transcriptase
QIEELLGRFVGDKVIIGGDLNCTLEIESWSSKLIRGFIDDHNFISCNNLPIDVTGTEYTYSNEVLGHYSYLDYFVVSSNLSLSILSLKIGCDELNLSDHSPVSMEAKNIINVDYKKSNSSSIKGDLIPETCYHNRWDHADIVGYYEFTRVGLQPVLEDLRSCLTNLKTVNVSNTKQRMKESIDSAYITILAVLNDAAYRHVPRIKANVLKFWWDQELSDLKSKAMASNKVWIEAGRPRSGYIFDVRKADKYKYKCLIKRKQLEIRNNITNDLHDALVQKDTEDFWKVWKSKFPNKKVNKFPLIDGSSDPNIIANKFVDYFSNVCTSEPLAYKNANNDLLNRLQDFICDSTSNKDIVSVELLEEVLESMSRGKAAGLDNLTIEHIQFAHPIIITILKELFNCFLEVGMVTDGFRDGLAIPLPKNDNASHNVNVDNFRCITISPVISKLFEHCLLRLFSKYFHSNDAQFGFKKKLGCSHAIYSVKQVVDYYVRGGSTVNICTIDISKAFDKVNLFILLGKLMDRNIPNCVINVLFDWFANSYITVKWLNVLSLRCQVNSGVRQGGVMSPVLFAIYVDEILVKLNNSGLGCNVKGLTVNSFMYANDLIILSASVTHLQKLINICVDELKSIQLSVNAKKCFCMRIGKRYAVSCNSVVIDNYHVQWTNEIRYLGVYFTAGHLLKFNFVPYKRRFYRCLNCILSKTGIKAINVVLSLTQSYCVPFLLYSVESTSLTATEKLRLASPFKRLFSRLFNSFDAQTIAYCQYYTGYLPLECVIDQRRLKFLKNLCNVNNVVLQSLLRLGGASEISKLLEKYNIVNNDNKSITYAIWNSFILENNLCVDH

SEQ ID NO: 305 - protein, 837 aa, synthetic construct
  source 1..837: note = MG148-24 reverse transcriptase
MPCAGTVDQLLLYSDTIDYIDSVLFECPGLNLFMAGDMNTDLNVFSPISDLVNNFLLRNKLHRCDILFPVSLKYTYMNESLNCSSTIDYMFTSSVYLTVAYNIVDLDVNLSDHVPLISVCLCRPLVQSRDDTIKCPVDVEHFRWDHAPTHLYYEQTRMLLQPILDDVNFLLCTNDTDGKFEINTTNIIYDKIVQALQESANKFIPKRRKNFYKYWWNQELDELKDKAIASCKLWKEARKPRSGPISVKYKQDKSNYKLGIKRAQNADVSFYSNDLHDALMRKNGREFWKVWNSKFTKSSDGHLLVDGLSDCAKIANKFADHFKMVCQPFSEKRSTELKAMYDSARANYVGQSIIDDQRVFDVQLISEKIMQMKSGKAAGLDKLSAEHLMYCHPIISVILCKLFNICMLSGHVPSGFGASYTVPIPKVEKSCRSLTVDDFRGISISPVISKVFELCLLDRYQDHLITSDHQFGFKHSIGCRHVIYNVRKTVDHYVNNGSTVNICSIDLSKAFDRMNHYALFLKLIKRGIPLALLSVMEYWFKLSVTCVRWCGYESPFFRLLAGVRQGGVLSPLLFSIFIDDIVYRVISTKVGCYISHVCVSIFLFADDILLLAPTLFGLQKLLSACEDELEFIDMHLNAVKSVCMRVGARFDASCASIYTHLGVALKWVETCKYLGVYMVSSKTFNCVFDEAKRKFFRAFNALYGRVGRSASDEVVVSLIKAKCLPIMLYGAEVCHLTKYQIRSFDFSINRLFMKIFKTGSISVVHECQVNFNFISVGYLIDIRESKFLYDFSNVNNYICQLFTKHANYRLSELYSLYGVSTVGQLRVAAQIAFASDC

SEQ ID NO: 306 - protein, 975 aa, synthetic construct
  source 1..975: note = MG148-25 reverse transcriptase
MDNCNIITYNMHGFNQGAELVKSYCSNAVSDFMLLQELWLSSDSLYKLDNIAHGYSCFSVSSMDSVLENGLLRGRPFGGLAILVRENHRNLCSLLASNERLIAVVYNDILIINVYFPCSSRLNYKDETLDLLVQIEELLGCFVGDKVVIGGDLNCTLEIESWSSKLIRGFIDDHNFISCNNLPIDVTGTVYTVYTYSNEVLGHYSYLDYFVVSSNLSLSIVSLKIGCDELNLSDHSPVSMEAKNIINVDYKKSNSSCNKGDLIPETCYHNRWDHADTVGYYESTRVGLQPVLEDLRSCLTNLKTVNVSNTKQRMKESIDSVYITILAVLNDAAYRHVPRIKANILKFWWDQELSDLKSKAMASNKVWIEAGRPRSGYIFDVRKADKYKYKSLIKRKQLEIRNNITNDLHDALVQKDTEDFWKVWKSKFPNKKVNKFPLIDGSSDPNIIANKFVDFFSNVCTSEPLAYKNANNDFLNRLQDFMGDSTSNKDTVSVELLEEVLESMSRGKAAGLDNLTIEHIQFAHPIIITILKELFNCFLEVGMVPDGFRDGLAIPLPKNDNASHNVNVDNFRCITISPVISKLFEHCLLRLFSKYFHSNDAQFGFKKKLGCSHAIYSVKQVVDYYVRGGSTVNICTIDISKAFDKVNLFILLGKLMDRNIPNCVIMVLFDWFTNSYITVKWLNVLSLRCQVNSGVRQGGVMSPVLFAIYVDEILDKLNNSGLGCNVKGLTVNSFMYADDLIILSASVTHLQKLINICVDELKSIQLSVNAKKCFCMRIGKRYAVSCNSVVIDNYHVQWTNEIRYLGVYFTAGHLLKFNFVPYKRRFYRCLNCILNKTGIKAINVVLSLTQSYCVPFLLYSVESTNLTATEKLRLASPFKMLFSRLFNSFDAQTIAYCQYYTGYLTLEFVIDQRRLKFLNNICNLNNVVIHSLFRLNGATEISSLIAKYNTNMFDIKSIKYSMWNSFILVNNLGVE

SEQ ID NO: 307 - protein, 975 aa, synthetic construct
  source 1..975: note = MG148-26 reverse transcriptase
MSLTMPANNNLFNFTTVVCNTDVTSKLVIISYNLHGLNQGLHGLRELISKCNPDVLCIQEHWLTPANLYKLKSISSAYSAYGSSAMSDTVSRGPLVGRPFGGTAILVKKKIDSATSNIVCRDRVTSICILDWLIVNVYMPCAGTVDQLLLYSDTIDYIDSVLFECPGLNIFMAGDMNTDLNVFSPISDLVNNFLLRNKLHRCDILFPVSLKYTYMNESLNCSSTIDYMFTSSVYLTVAYTIVDIDVNLSDNVPLISVCLCRPLVQSRDDTIKCPVDVEHFRWDHAPTHLYYEQTRMLLQPILDDVNFLLCTNDTDGKFEINTTNIIYDKIVQALQESANKFIPKRRKNFYKYWWNQELDELKDKAIASCKLWKKARKPRSGPISVKYKQDKSNYKLGIKRAQNADVSFYSNELHDALMRKNGREFWKVWNSKFTKSSDGHLLVDGLSDCAKIANKFADHFKMVCQPFSEKRSTELKAMYDSARANYVGQSIIDDQRVFDVQLISEKIMQMKSGKAAGLDKLSAEHLMYCHPIISVILCKLFNICMLSGHVPSGFGASYTVPIPKVEKSCRSLTVDDFRGISISPVISKVFELCLLDRYQDHLITSDHQFGFKHSIGCRHVIYNVRKTVDHYVNNGSTVNICSIDLSKAFDRMNHYALFLKLIKRGIPLALLSVMEYWFKLSVTCVRWCGYESPFFRLLAGVRQGGVLSPLLFSIFIDDIVYRVISTKVGCYISHVCVSIFLFADDILLLAPTLFGLQKLLSACEDELEFIDMHLNAVKSVCMRVGARFDASCASIYTHLGVALKWVETCKYLGVYMVSSKTFNCVFDEAKRKFFRAFNALYGRVGRSASEEVVVSLIKAKCLPIMLYGAEVCHLTKYQIRSFDFSINRLFMKIFKTGSISVVHECQVNFNFISVGYLIDIRESKFLYDFSNVNNYICQLFTKHANYRLSELYSLYGVSTVGQLRVAAQIAFASDC

SEQ ID NO: 308 - protein, 962 aa, synthetic construct
  source 1..962: note = MG148-27 reverse transcriptase
MDNCNIITYNMHGFNQGAELVKSYCSNALSDFMLLQELWLSSDSLYKLDNIAHGYSCFSVSSMDSVLENGLLRGRPFGGLAILVRENHRNLCSLLASNERLIAVVYNDILIINVYFPCSSRLNYKDETLDLLVQIEELLGCFVGDKVVIGGDLNCTLEIKSWSSKLIRGFIDDHNFISCNNLPIDVTGTVYTYFNEVLGHYSYLDYFVVSSNLSLSIVSLKIGCDELNLSDHSPVSMEAKNIINVDYKKSNSSCNKGDLIPETCYHNRWDHADTVGYYESTRVGLQPVLEDLRSCLTNLKTVKASNTKQRMKESIDSVYITILAVLNDAAYRHVPRIKANILKFWWDQELSDLKSKAMASNKVWIEAGRPRSGYIFDVRKADKYKYKSLIKRKQLEIRNNITNDLHDALVQKDTEDFWKVWKSKFPNKKVNKFPLIDGSSDPNIIANKFVDFFSNVCTSEPLAYKNANNDFLNRLQDFMGDSTSNKDTVSVELLEEVLESMSRGKAAGLDNLTIEHIQFAHPIIITILKELFNCFLEVGMVPDGFRDGLAIPLPKNDNASHNVNVDNFRCITISPVISKLFEHCLLRLFSKYFHSNDAQFGFKKKLGCSHAIYSVKQVVDYYVRGGSTVNICTIDISKAFDKVNLFILLGKLMDRNIPNCVIMVLFDWFTNSYITVKWLNVLSLRCQVNSGVRQGGVMSPVLFAIYVDEILDKLNNSGLGCNVKGLTVNSFMYADDLIILSASVTHLQKLINICVDELKSIQLSVNAKKCFCMRIGKRYAVSCNSVVIDNYHVQWTNEIRYLGVYFTAGHLLKFNFVPYKRRFYRCLNCILSKTGIKAINVVLSLTQSYCVPFLLYSVESTNLTATEKLRLASPFKMLFSRLFNSFDAQTIAYCQYYTGYLPLEFVIDQRRLKFLNNICNLNNVVIHSLFRLNGATEISSLIAKYNTNMFDIKSIKYSMWNS

SEQ ID NO: 309 - protein, 707 aa, synthetic construct
  source 1..707: note = MG148-29 reverse transcriptase
CHVVLGGDFNVDFSRSWTHTALLNSFCVSNGLEPTINHVNSRIDYSYNFNMERFSVLDHFIVSGTVYDQLIDSLTALHDVDNISDHDFILFNMKIDIRYIGAANRVYSVRQSWVKASADDFIRYRLNLSDNLKSIRFPTSAILCPDLHCADSDHISAICQYTQDISDACLSAAKSAIPRTAYSGNHDLVHRIPGWAEVVEPVRQKSLFWHNIWNDCDRPRTGVVADCMRRTRTRYHCAIRQAKKDEESIIRRRFAESLHNNPSRNFWAEVKKIRGNKVSRSRIVDGCTDESIISKKFAEKYRALYTSVPFDHDEMRTISNDVNSRLIDGNMVDNNYVITSQDVTDAVSRLHAHKTDGNIGLSTDHFLHAGIDLHMHVSFLFTCAIVHGCVPADFACSTILPIPKKSNANCSDSDNYRGIALSSVFCKIFDNIVLEKFRDVLETSELQFGFKQSSSTNMCTMILKEAISYYINNNTFAFCTFLDASKAFDRVNYCKLFRLLATRGLPALVVRFIIKLYTANSVCVSWAGFTSDYFNVVNGVKQGGVLSPVLFCIYIDNMLTNLSSCGAGCYIGSNFVGALAYADDVVLIAPTPSAMRKMLAVCDSFALEHNILFNASKSKFVVIAPRNKRLLYKQMCECVFYIGGQKVDSVDSYVHLGHIINSTFVDSEDILHRRNCFVGQANNVLCFFGKLDFDVKISLFKSYCSSF

SEQ ID NO: 310 - protein, 866 aa, synthetic construct
  source 1..866: note = MG148-30 reverse transcriptase
NITVGIATCERFTAIKLANWLLVNVYLPCSGTDQRLLIYSDVLCEVQSLISAHSDCDYLVGGDFNSDLTDAKSHAINHMINDFIVTNNLCRCDVVFPVATKYTYINESLDCSSTIDYMLTSNCDSTIAFNIMDLDLNLSDHLPILVVLALNADLSNATCNANPSVDVTHLRWDHAQINEYYDLTRLGLDPVLCEVTVVINNFHCAPESMVADQIDALYERVVNVLSQCADQCVPKQRKNFFKFWWSQELAELKEKAIASCRLWKEAGRPRNGPINVKYRQDKLLYKKRIREERAEESSSFTNDLHEALLRKSGSDFWKVWNSKFENKSSKIIQVGGTADSNVIVNNFAKHFEEVCQPFTAARNADLKAQYDDVRVNYSTPPVFSDAEIFDAELVGNLLVKMKNGKAAGLDGITSEHLKHSHPSVVVILCKLFNLFIATGHIPISFAASYTVPIPKCDGRSKSLEVNDFRGISISPVISKLFELCVLERYRDYFDTSDHQFGFKKTLSCSHVIYSVRTVIENFISNGSTVNLCALDLSKAFDRMNHYALFIKLIKRKFPVEILQILEHWFCGSKTCVRWGGQVSYFFAMVAGVRQGGVLSPVLFSIFIDDIVNKVKLANVGCYLSNICVSIFLYADDILLIAPTVTGLQTLLTVCEQELLELDMKLNVDKSVCIRFGDQFDASCTDIMSVQGGRLLWVDSCRYLGVYFTSGRVFRCCFHNAKCSFFRSFNAIFSKVGRFASEQVILSLLRTKCLPILLYGLEACPVLKSDKHSLNFTLTRLFMKLFRTGSPAVVAECQLQFNFLPLQYQVDIRTAKFLFRFLNSANSLCILLSVHAKAQLTSILSSYGEDVSSIYDLHVAISDILVA

SEQ ID NO: 311 - protein, 971 aa, synthetic construct
  source 1..971: note = MG148-31 reverse transcriptase
MMAALSNSTHLIGNSNCTGARLVVISYNLHGLNQGMTGIRELIRHVNPDVIMVQEHWLTSDNLFKLSDISDKYFVFGSSAMDARVSAGPLVGRPFGGTAMLIKNSFVNITVGIATCERFTAIKLANWLLVNVYLPCSGTDQRLLIYSDVLCEVQSLISAHSDCDYLVGGDFNSDLTDAKSHAINHMINDFIVTNNLCRCDVVFPVATKYTYINESLDCSSTIDYMLTSNCDSTIAFNIVDLDLNLSDHLPILVVLALNADLSNATCNANPSVDVTHLRWDHAQINEYYDLTRLGLDPVLCEVTVVINNFHCAPESMVADQIDALYERVVNVLSQCADQCVPKQRKNFFKFWWSQELAELKEKAIASCRLWKEAGRPRNGPINVKYRQDKLLYKKRIREERAEESSSFTNDLHEALLRKSGSDFWKVWNSKFENKSSKIIQVGGTADSNVIVNSFAKHFEEVCQPFTAARNADLKAQYDDVRANYSTPPVFSDAEIFDAELVGNLLVKMKNGKAAGLDGITSEHLKHSHPSVVVILCKLFNLFIATGHIPISFAASYTVPIPKCDGRSKSLEVNDFRGISISPVISKLFELCVLERYRDYFDTSDHQFGFKKTLSCSHVIYSVRTVIENFISNGSTVNLCALDLSKAFDRMNHYALFIKLIKRKFPVEILQILEHWFCGSKTCVRWGGQVSYFFAMVAGVRQGGVLSPVLFSIFIDDIVNKVKLANVGCYLSNICVSIFLYADDILLIAPTVTGLQTLLTVCEQELLELDMKLNVDKSVCIRFGDQFDASCTDIMSVQGGRLLWVDSCRYLGVYFTSGRVFRCCFHNAKCSFFRSFNAIFSKVGRFASEQVILSLLRTKCLPILLYGLEACPVLKSDKHSLNFTLTRLFMKLFRTGSPAVVAECQLQFNFLPLQYQVDIRTAKFLFRFLNSANSLCILLSVHAKAQLTSILSSYGEDVSSIYDLHVAISDIL

SEQ ID NO: 312 - protein, 1004 aa, synthetic construct
  source 1..1004: note = MG148-32 reverse transcriptase
MASEQINLRDCDSAEKLIVISYNLHGLNQGRPGITELISLLSPDAIMIQEHWLTPDNMYKLDQLSDNYLVFGSSAMNDCVLSGPLIGRPFGGTAIIIKKSLASVTKNIISSDRYNVVKIANWLLFNVYMPCVGTDYREYLYVEILSEFDSLLAANPNCSCLVGGDFNTCLDNPVNVSVTINTFIANNMLHRCDILFPSSNKFTFFNESTHSGTAIDYMLASDPNDIIAFNVLDMDINLSDHHPIMAVCACPKLSIDPSSCQTNLPEIQHFRWDHAQLDNYYEHTRRLLQPVYDELNVLACCHVSLDAMIVADKIDSIYNRFVTALCVSAEKFIPKHRKNFYKFWWSQELDALKEKSIASCRKWKEAGKPRNGPIQAQYKKDKLLYKKCIKEEQAAETCSFTNDLHDALLCKSNQDFWKTWRSKFSNNSNNIIQVDGIADGAAIANNFANFFESNSKPFSDSRNAELKAQYTELRADYCGCPVTDNELFDVELIGKLITEMKNNKAAGLDELTCEHLKFSHPIAICILTQLFNLFIALSHIPSSFGASYTVPIPKCDGRTRAMSVDDFRGISISPVISKVFEMAVLDRFAPYFRTSDHQFGFKRNIGCREAIYSVRNVIETFISNGSTINVCTLDLSKAFDRMNHYALLIKLIERKLPFQLLIVLENWFLISITCVKWNGHVSHFFRLLLGVRQGGVLSPLLFAIFVDDIVIRVKSTHAGCYISLVCCCIFLYADDILLVSPTVSGLQILLNACENELTELDMKINVKKSMCIRFGKRFDVHCAELVSVQGGPILWVDSCRYLGVYFLSGRSFRCSLDDAKSRFFRAFNAIYSKVGHFASETVILNLIRTKCLPILLYATEACPLLSRQKHSLEFTVTRIFMRIFHTGSMDIVKQCQCNFGFLSVSYQLSVRTARFLQKLVASENSLCLLFSRTASDQLAKIFSFFDEDIKTACQLNNFFYTNYCLLALINWVLINRKFIYLFIFFYFFFRFNINLFVLLMSGRC

SEQ ID NO: 313 - protein, 337 aa, synthetic construct
  source 1..337: note = MG148-33 reverse transcriptase
MFIPKHRKNFYKFWWSQELDLLKSKAIESNNAWKCAGKPKNGAIFSQYKQDKLIYKKRIREECFNETKSYTNDLHDALLCKSGQAFWKTWQSKFESKSANVMQVDGTADSDIITDKFAKYFEANCSPFSTERNDEFKKKYTELRLHYSGSPITDDQAFDVELISRLVSNMDKGKAAGLDELSSEHLKFSHPILICILTKLFNLFVFKGHIPTSFGSSYTVPIPKCDGRTRALSVDDFRGISISPVLSKLFELAIFDRFSTYFTTSDHQFGFKKHLSCRNAIYCVRNVVESFGSNGSTVNVCALDLSKVFDRMNHYALFIKLIERDFPTKLLNVLETW

SEQ ID NO: 314 - protein, 903 aa, synthetic construct
  source 1..903: note = MG148-34 reverse transcriptase
YFVFGSSAMSERVASGPLYGRPFGGTAIFINNKYASVTTNLVSSDRYTAIKIANFMLITVYMPSVGTAQRDFLCSELLAELDALLSSNSNSNSNCQFLIGRDFNTNLDSNANVSLAINEFISNNSIYRCDEIFDVADSYTFCNETAHCFSTIDYMLTSCAQDIIAFNVVDMDINLSDHNPILSVCSCCIDTRSVNKNEKSADLYAEFFRWDHAPVDKYYDQTRVLMQPVLDEISSLVINSAYMDKESIAIASDSIYDNLVDAMRSSANLFIPKHRKNFFKFWWSQELDELKEKAIVSCREWKSAGKPKSGVTFQQYLKDKALYKKSIRYEQQREKSCYTNDLHEALLHKNGQDFWKVWKSKFEIGSTNTIVDGLADSAAIANKFAQHLESNCRPFNSERSAALKIQYIDQRAQYCGTPITDCQWFDVELIDRLTREMKNGKAAGLDEISCEHLKFSHPIVVCILSKLFNLFLSTGHIPASFGVSYTVPIPKCDGRTRALTVDDFRGISISPVISKLFEMAVLDRFSHYFVTSDYQFGFKKHLSCSNAIFCVRNVIENFVSRGTTVNVCTLDLSKAFDRMNHYALLVKLMSRKIPDLLLCIFELWFSISVTCVKWDNHFSHFFLLIVGVRQGGVLSPVLFAIFIDSIVDKVKSTNVGCYISLICCCIFLYADDIILIAPSIHALQTLLNACEDELFVLDMCVNVKKSACIRFGTRHDAQCCEIISSFGGSIKWVESCRYLGVFLVSGRNYSCSFHDAKSRFFRAFNAVFGKIGRIASEEVVLSLLKAKCLPILLFATEACPLLSRQKTSFDFTLTRIFMKLFNTGSAVIAKECQNLFNFLPIRMQLSIRTARFLQKFAACENNLCSLFADIAVKQLNVLFSEYNVKTACQLANAIYRKLSETLN

SEQ ID NO: 315 - protein, 613 aa, synthetic construct
  source 1..613: note = MG148-35 reverse transcriptase
MAANLVTISYNLHGYNQGCPGIRELMLKLRPDIFMLQEHWLSPDDLSKLDNISDCYFVFGSSAMLDCVSSGPLVGRPFGGTAFLINKKHVSATSNIESGDRFTVIKIYNWLLINVYLPCVGTPHRDDLYLDILHQLQNIISANSDCSCLIGGDFNVDLDCNSNISLLVNEFMGNNNMHRCDVMFPVSNRNTFVNEATNTGSAIDYILSSTSDNMIAFNILELDVNLSDHLPIMAVCAIDRSFLSLNTHGESYSTDDVTHLRWDHAPLHLYYEHTRLLLQPVLANIDELLESSIAEDDMLYVKGADQIYSNIVNILRESANLYIPKHKKNFYKFWWSQELDLLKSKAIESNNAWKCAGKPKNGAIFSQYKHDKLIYKKRIREECFNETKSYTNDLHDALLCKSGQAFWKTWKSKFESKSANVMQVDGTADSDIITDKFAKHFEANCSPFSTERNDEFKKKYTELRLHHSGSPITDDQAFDVELISRLVTNMDKGKAAGLDELSSEHLKFSHPILICILTKLFNLFLLKGHIPTSFSYSYTVPIPKCDGRTRALSVDDFRGISISPVLSKLFEMAIFDRFSTYFTTSDHQFGFKKHLSCRNAIYCVRSVVESFVS

SEQ ID NO: 316 - protein, 973 aa, synthetic construct
  source 1..973: note = MG148-36 reverse transcriptase
MMAALSNSTHLIGNSNCTGARLVVISYNLHGLNQGMTGIRELIRHVNPDVIMVQEHWLTSDNLFKLSDISDKYFVFGSSAMDARVSAGPLVGRPFGGTAMLIKNSFVNITVGIATCERFTAIKLANWLLVNVYLPCSGTDQRLLIYSDVLCEVQSLISAHSDCDYLVGGDFNSDLTDAKSHAINHMINDFIVTNNLCRCDVVFPVATKYTYINESLDCSSTIDYMLTSNCDSTIAFNIVDLDLNLSDHLPILVVLALNADLSNATCNANPSVDVTHLRWDHAQINEYYDLTRLGLDPVLCEVTVVINNFHCAPESMVADQIDALYERVVNVLSQCADQCVPKQRKNFFKFWWSQELAELKEKAIASCRLWKEAGRPRNGPINVKYRQDKLLYKKRIREERAEESSSFTNDLHEALLRKSGSDFWKVWNSKFENKSSKIIQVGGTADSNVIVNSFAKHFEEVCQPFTAARNADLKAQYDDVRANYSTPPVFSDAEIFDAELVGNLLVKMKNGKAAGLDGITSEHLKHSHPSVVVILCKLFNLFIATGHIPISFAASYTVPIPKCDGRSKSLEVNDFRGISISPVISKLFELCVLERYRDYFDTSDHQFGFKKTLSCSHVIYSVRTVIENFISNGSTVNLCALDLSKAFDRMNHYALFIKLIKRKFPVEILQILEHWFCGSKTCVRWGGQVSYFFAMVAGVRQGGVLSPVLFSIFIDDIVNKVKLANVGCYLSNSCVSIFLYADDILLIAPTVTGLQTLLTVCEQELLELDMKLNVDKSVCIRFGDQFDASCTDIMSVQGGRLLWVDSCRYLGVYFTSGRVFRCCFHNAKCSFFRSFNAIFSKVGRFASEQVILSLLRTKCLPILLYGLEACPVLKSDKHSLNFTLTRLFMKLFRTGSPAVVAECQLQFNFLPLQYQVDIRTAKFLFRFLNSANSLCILLSVHAKAQLTSILSSYGEDVSSIYDLHVAISDILVA

SEQ ID NO: 317 - protein, 388 aa, synthetic construct
  source 1..388: note = MG148-37 reverse transcriptase
AIFDRFSTYFTTSDHQFGFKKHLSCRNAIYCVRSVVESFVSNGSTVNVCALDLSKAFDRMNHYALFIKLIERDFPTKLLNVLETWFCTSITCVKWGRNVSSFFSLHAGVRQGGVLSPILFSVFIDDIVAKVKVANVGCHISTICASIFLYADDVMLVAPSVSGLQSLLTVCENELIKLDMRINIKKSMCIRFGQRFDAPCEELVSIFGGSLKWVSICRYLGVYFVSGRTFKCCFHMAKSQFYRAFNSVFSKVGRAASEEIILVLINAKCMPILMYALEACPLLSRDKHSFQFTITRLFMKLFRTGSTAVVEECQRQFNFLPFKQQLDIRTAKFLQSFLASENSLCLLFEINARLLLNSIFSNYGNTVRTACQLVNKIHEHFFLVRNQD

SEQ ID NO: 318 - protein, 1010 aa, synthetic construct
  source 1..1010: note = MG149-1 reverse transcriptase
MDQLRNNVNARSLPGSNALYGSSTVSKEQGPLHRRPDVVKSKQGFPHFRERVWVKKLVHDRRIRFGTWNIGTLTGKSMEIVDVMVRRKINFMCLQETKWTGEKAKELDNSGFKLWYTGKIRSRNGVGIIVDKEWKKDVVDVRRVGDRIIVLKLVVGQDTFNVISGYAPQVGLAEHFKVKFWEDLEGVLQDIPQGEKVFLGGDLNGHVGSVARGFEGVHGGFGLGEMNGEGKSILEFSEALDLSIANTWFKKREEHLITYKSGGTCSQIDFFLIRKSDRKYCLNCKVIPGESLTTQHRVLVMDVRIRDRAKRRSPLVAPRIKWWHLKGEKQGIFQQKIWEGWCGQSQGSANDMWNKMSQEIIKVAKETLGESRGFGPRGKESWWWNENVQSKVRVKKECFKEWSRCRNSETWDKYKIARNETKKAVSEARAQAFDGLYQALGTRDGERSIYRLAKGRERKTRDLDQVKCVKDEEGKVLVHEKDIKERWKVYFHNLFNDGYGYDSSSLDTREEDRNYKYYRRIQKQEVKEALKRMSNGKAVGPDNIPIEVWKTLGDRGLEWLTELFNEIMRSKRMPEEWRRSTLVPIYKNKGDIQNCANYRGIKLMSHTMKLWERVIERRLRKETQVTENQFGFMPGRSTMEAIYLLRRVMEQYRMAQQDLHLIFIDLEKAYDRVPREILWKALEKKGVRVAYIRAIQDMYDRVSTSVRTQGGESDDFPITIGLHQGSTLSPYLFTLILDVLTEQIQEIAPRCMLFADDIVLLGESREELNERLETWRRALETHGFRLSRSKSEYMECKFNKRRRVSNSEVKIGDHIIPQVTRFKYLGSVIQDDGEIEGDVNHRIQAGWMKWRKASGVLCDAKVPIKLKGKFYRTAVRPAILYGTECWAVKSQHENKVGVAEMRMLRWMCGKTRQDKIRNEAIRERVGVAPIVEKMVENRLRWFGHVERRPVDSVVRRVDQMERRQTIRGRGRPKKTIREVIKKDLELNDLDRSMVLDRTLWRKLIHVADPT

SEQ ID NO: 319 - protein, 712 aa, synthetic construct
  source 1..712: note = MG149-2 reverse transcriptase
MVEFWARPDSSKGNKLPLRLPEFALRYTEVRSAIRSTWEEFRGFFPLPHDDDSEAQKRVHWEVESHQWDKCKKKMLVAGAAAYRAVRKVEMAPLCKTKKMWEKRKRRCHSMGLNNPRAAQWKEQEAQAREAYFSLLTSIGRRKKDMAEARAIKYRGKSNTHFLRPSFMSRKRAGITSMSVDGSDNKDMERTSDASIWKTNFNEFYKELYSPKVIDTDVLNDILAETDISLPPRLLTKLRRKAKLSEIEKIIDTLPAGKAPGPDSLPYGVWGILRDTSPMAFCNLFNACMDRGKIVNSARKANIALLPKEPDSFACGMYRPISLTNTDYKIIMRVWADRLGPMLNTVVGGHQLGFIPGRDGRENIINEQFLIDYYQHKGLRGAVVFLDLQKAFDCVSHEALMIIMRHHGWPEEFVGFVENVYMHNTARLIVNGELSEESVKVESGTRQGCPLSPLLFTLVAEMLCQPIINDTGFKGTNMEGGNRKALSAYADDIAINNSCDGDVDIMNDKLDRFKQATGMRVNKKKSEAVLVGGWVKRPPGALLFPCVCKVKYLGCPVGRLTDLDYTNTLEAMEGKLDATFRRWNRAATAPKDRILLAKTMALSKLWYMASVMPWSIQSLRRIQKTTIRYIWGFKSHKVSMAQLQLPKKELGLNMWSLVAKVRALNARWGLHYVTNRLSPNLLNLIQTVYNSPKVGRMDKDREPLEYSGSLPG

SEQ ID NO: 320 - protein, 704 aa, synthetic construct
  source 1..704: note = MG149-3 reverse transcriptase
IKMRPKVLKNLGIKWWALKGEMKLAFREKMFKQDSWNTMEDTNVMWERMAKQIKELGRQVVGESKGQAPFHKESWWWQKEVQDKVNAKRACYKALYKCRNDENKEKYKTARKEAKEAVSKARNVAYEDLYRRLNTKDGEKDIYRLAKARDKKTKDLSNVKCIKDECQKVLVEDEAIRRRWMSYFQQLFNEGVDNEQVRGSLRNMEENKNYEYYRKIREYEVENALNKMKNGKAVGPDEIPIEVWKCLGRKGILWLTSLFNRILKTKKMPEEWRKSILIPIFKNKGDIQNCANYRGIKLMSHTLKLWERVLEQRLRKETSISENQFGFMPGRSTMEAIHLLRMLIERYRSKKQDLHMVFIDLEKAYDRVPREILWRVLALKGIKVAYIQAIKDMYEGATTYVKTPCGVSQEFSISIGLHQGSALSPYLFAIVMDELTKHIQDEVPWCMLFADDIVLVDETRAGINHKLELWRETLEGKGFRLSRSKTEYMEFKFSQQRSRTQEAVRIGDTKVPTSGRFRYLGSILQRDGGIDDDVRHRIQAGWSKWRSATGVLCDRKVPEKLKDKFYRTAIRPAMLNGTECWATKHEHEQKMKVAEMRMLRWICGHSRMDKIRNEVIRERVGVAPIEEKMMENRLRWYGHIMRRDPDAPVRRCAIRDIEIGRRGRGRPRKTWWETIRKDLELLELDESIVNRTQWRNRIHIADPT

SEQ ID NO: 321 - protein, 1018 aa, synthetic construct
  source 1..1018: note = MG149-5 reverse transcriptase
MNHLRKIVGASPTQRRAASNPGCSDKWARVARSSSGSDAPHRRPGVVSNEQGFPRLSGRARVKKLAQERRIRLASWNVGSLTGRLAELAEVMCRRKISILCVQETKWVGEKARVVEPWGCKLWYTGVDRSRNGVGIIIDKSLVEDVVEVIRRGDRILLVRLVLGNEILNVISAYAPQVGLDEASKRKFWEDLDEVVQRIPVREKLFIGGDFNGHVGTSRVGFEELHGGYGFGDRNEGGQSILDFALAYDLVVANTWFRKRDSHIITYRSGPSKSQIDFFLARRLDRGCCLDCKVIPGESVVTQHRLLVLDARLSRGCSRSRRRLEPRIKWWRLREATQKTFIEGIVRGADWKCEDDPDTTWTKMTSCIKKVATDLLGESKGSGLPGKDTSWWNDEVKAAIKTKRDCYRDLKRNNDGASFERYKIAKKEAKKAVQQARDRVYKDIYEKRDNKDAERDMYKLARIREKKSRDLGVVKCIKDDRQTVLVHDDQIKDRWREYFDGLFNGDFSQDVGNITVSPIDMNRNFLRRIQRSEVKDALKRMKTRKAVGPDGIPIEVWRVLGEVGVSWLTDLFNKIWRTNKIPNEWRKSTLVPIYKNKGDIQNCSNYRGIKLMCHTMKLWERVIEHRLRQFVLISENQFGFMPGRSTTEAIHLIRQLIERFREKNRDLHMVFIDLEKAYDKVPREVLWWTLVKKRVPVKYINIIKDMYDNVETSVRTCGGLTSAFPITIGLHQGSALSPFLFAIVIDEITRAIQGQVPWCMMFADDIVLIDETRAGVNGKLELWRHTLESRGFRLSRTKTEYLECKFNKRRTPDDSTVKLAGQEIPRSTQFRYLGSILQKDGEIDGDVHHRIQAGWMKWKSATGILCDRNFPLKLKGKFYRTAIRPALLYGSECWAIKQQQVQKMSVAEMRMLRWMCGHTRQDRIRNEVIRTKLGVTSIEEKMRENRLRWFGHVKRRPIDAPVRRVETLDLGQTCRARGRPKKTWMEVIRNDMKLRGVTEDVIHRRNEWRKRIHVADST

SEQ ID NO: 322 - protein, 1018 aa, synthetic construct
  source 1..1018: note = MG149-6 reverse transcriptase
MNHFRKIVGASPTQRRAASDPGCSDKWARVARSSPGSDAPHRRPGVVSNEQGFPRLSGRARVKKLAQERRIRLASWNVGSLTGRLAELAEVMCRRKISILCVQETKWVGEKARVEEPWGCKLWYTGVDRSRNGVGIIIDKSLVEDVVEVIRRGDRILLVRLVLGNEILNVISAYAPQVGLDEASKRKFWEDLDEVVQRIPVREKLFIGGDFNGHVGTSRVGFEELHGGYGFGDRNEGGQSILDFALAYDLIVANTWFRKRDSHIITYRSGPSKSQIDFFLARRLDRGCCLDCKVIPGESVVTQHRLLVLDARLSRGRSRSRRRLEPRIKWWRLREATQKTFVEGIVRGADWKCEDDPDTTWTKMTSCIKKVATDLLGESKGSGLPGKDTSWWNDEVKAAIKTKRDCYRDLKRNNDGASFERYKIAKKEAKKAVQQARDRVYKDIYEKRDNKDAERDMYKLARIREKKSRDLGVVKCIKDDRQTVLVHDDQIKDRWREYFDGLFNGGFSQDVGNITVSPSDMNRNFLRRIQRSEVKDALKRMKTRKAVGPDGIPIEVWRVLGEVGVSWLTDLFNKIWRTNKIPNEWRKSTLVPIYKNKGDIQNCSNYRGIKLMCHTMKLWERVIEHRLRQFVLISENQFGFMPGRSTTEAIHLIRQLIERFREKNRDLHMVFIDLEKAYDKVPREVLWWTLVKKRVPVKYINIIKDMYDNVETSVRTCGGLTSAFPITIGLHQGSALSPFLFAIVIDEITRAIQGQVPWCMMFADDIVLIDETRAGVNGKLELWRHTLESRGFRLSRTKTEYLECKFNKRRTPDDSTVKLAGQEIPRSTQFRYLGSILQKDGEIDGDVHHRIQAGWMKWKSATGILCDRNFPLKLKGKFYRTAIRPALLYGSECWAIKQQQVQKMSVAEMRMLRWMCGHTRQDRIRNEVIRTKLGVTSIEEKMRENRLRWFGHVKRRPIDAPVRRVETLDLGKTCRARGRPKKTWMEVIRNDMKLRGVTEDVIHRRNEWRKRIHVADST

SEQ ID NO: 323 - protein, 1018 aa, synthetic construct
  source 1..1018: note = MG149-7 reverse transcriptase
MNHFRKIVGASPTQRRAASDPGCSDKWARVARSSPESDAPHRRPGVVSNEQGFPRLSGRARVKKLAQERRIRLASWNVGSLTGRLAELAEVMCRRKISILCVQETKWVGEKARVEEPWGCKLWYTGVDRSRNGVGIIIDKSLVEDVVEVIRRGDRILLVRLVLGNEILNVISAYAPQVGLDEASKRKFWEDLDEVVQRIPVREKLFIGGDFNGHVGTSRVGFEELHGGYGFGDRNEGGQSILDFALAYDLVVANTWFRKRDSHIITYRSGPSKSQIDFFLARRLDRGCCLDCKVIPGESVVTQHRLLVLDARLSRGCSRSRRRLEPRIKWWRLREATQKTFVEGIVRGADWKCEDDPDTTWTKMTSCIKKVATDLLGESKGSGLPGKDTSWWNDEVKAAIKTKRDCYRDLKRNNDGASFERYKIAKKEAKKAVQQARDRVYKDIYEKRDNKDAERDMYKLARIRENKSRDLGVVKCIKDDRQTVLVHDDQIKDRWREYFDGLFNGGFSQDVGNITVSPSDMNRNFLRRIQRSEVKDALKRMKTRKAVGPDGIPIEVWRVLGEVGVSWLTDLFNKIWRTNKIPNEWRKSTLVPIYKNKGDIQNCSNYRGIKLMCHTMKLWERVIEHRLRQFVPISENQFGFMPGRSTTEAIHLIRQLIERFREKNRDLHMVFIDLEKAYDKVPREVLLWTLVKKRVPVKYINIIKDMYDNVETSVRTCGGLTSAFPITIGLHQGSALSPFLFAIVIDEITRAIQGQVPWCMMFADDIVLIDETRAGVNGKLELWRHTLESRGFRLSRTKTEYLECKFNKRRTPDDSTVKLAGQEIPRSTQFRYLGSILQKDGEIDGDVHHRIQAGWMKWKSATGILCDRNFPLKLKGKFYRTAIRPALLYGSECWAIKQQQVQKMSVAEMRMLRWMCGHTRQDRIRNEVIRTKLGVTSIEEKMRENRLRWFGHVKRRPIDAPVRRVETLDLGKTCRARGRPKKTWMEVIRNDMKLRGVTEDVIHRRNEWRKRIHVADST

SEQ ID NO: 324 - protein, 1010 aa, synthetic construct
  source 1..1010: note = MG149-8 reverse transcriptase
MDQLRNNVNARSLPGSNALYGSSTVSKEQGPLHRRPDVVKSKQGFPHFRERVWVKKLVHDRRIRFGTWNIGTLTGKSMEIVDVMVRRKINFMCLQETKWTGEKAKELDNSGFKLWYTGKIRSRNGVGIIVDKEWKKDVVDVRRVGDRIIVLKLVVGQDTFNVISGYAPQVGLAEHFKVKFWEDLEGVLQDIPQGEKVFLGGDLNGHVGSVARGFEGVHGGFGLGEMNGEGKSILEFSEALDLSIANTWFKKREEHLITYKSGGTCSQIDFFLIRKSDRKYCLNCKVIPGESLTTQHRVLVMDVRIRDRAKRRSPMVAPRIKWWHLKGEKQGIFQQKIWEGWCGQSQGSANDMWNKMSQEIIKVAKETLGESRGFGPRGKESWWWNENVQSKVRVKKECFKEWSRCRNSETWDKYKIARNETKKAVSEARAQAFDGLYQALGTRDGERSIYRLAKGRERKTRDLDQVKCVKDEEGKVLVHEKDIKERWKAYFHNLFNDGYGYDSSSLDTREEDRNYKYYRRIQKQEVKEALKRMSNGKAVGPDNIPIEVWKTLGDRGLEWLTELFNEIMRSKRMPEEWRRSTLVPIYKNKGDIQNCANYRGIKLMSHTMKLWERVIERRLRKETQVTENQFGFMPGRSTMEAIYLLRRVMEQYRMAQQDLHLIFIDLEKAYDRVPREILWKALEKKGVRVAYIRAIQDMYDRVSTSVRTQGGESDDFPITIGLHQGSTLSPYLFTLILDVLTEQIQEIAPRCMLFADDIVLLGESREELNERLETWRRALETHGFRLSRSKSEYMECKFNKRRRVSNSEVKIGDHIIPQVTRFKYLGSVIQDDGEIEGDVNHRIQAGWMKWRKASGVLCDAKVPIKLKGKFYRTAVRPAILYGTECWAVKSQHENKVGVAEMRMLRWMCGKTRQDKIRNEAIRERVGVAPIVEKMVENRLRWFGHVERRPVDSVVRRVDQMERRQTIRGRGRPKKTIREVIKKDLEINGLDRSMVLDRTLWRKLIHVADPT

SEQ ID NO: 325 - protein, 1010 aa, synthetic construct
  source 1..1010: note = MG149-9 reverse transcriptase
MDQLRNNVNARSLPGSNALYGSSTVSKEQGPLHRRPDVVKSKQGFPHFRERVWVKKLVHDRRIRFGTWNIGTLTGKSMEIVDVMVRRKINFMCLQETKWTGEKAKELDNSGFKLWYTGKIRSRNGVGIIVDKEWKKDVVDVRRVGDRIIVLKLVVGQDTFNVISGYAPQVGLAEHFKVKFWEDLEGVLQDIPQGEKVFLGGDLNGHVGSVARGFEGVHGGFGLGEMNGEGKSILEFSEALDLSIANTWFKKREEHLITYKSGGTCSQIDFFLIRKSDRKYCLNCKVIPGESLTTQHRVLVMDVRIRDRAKRRSPMVAPRIKWWHLKGEKQGIFQQKIWEGWCGQSQGSANDMWNKMSQEIIKVAKETLGESRGFGPRGKESWWWNESVQSKVRVKKECFKEWSRCRNSETWDKYKIARNETKKAVSEARAQAFDGLYQALGTRDGERSIYRLAKGRERKTRDLDQVKCVKDEEGKVLVHEKDIKERWKAYFHNLFNDGYGYDSSSLDTREEDRNYKYYRRIQKQEVKEALKRMSNGKAVGPDNIPIEVWKTLGDRGLEWLTELFNEIMRSKRMPEEWRRSTLVPIYKNKGDIQNCANYRGIKLMSHTMKLWERVIERRLRKETQVTENQFGFMPGRSTMEAIYLLRRVMEQYRMAQQDLHLIFIDLEKAYDRVPREILWKALEKKGVRVAYIRAIQDMYDRVSTSVRTQGGESDDFPITIGLHQGSTLSPYLFTLILDVLTEQIQEIAPRCMLFADDIVLLGESREELNERLETWRRALETHGFRLSRSKSEYMECKFNKRRRVSNSEVKIGDHIIPQVTRFKYLGSVIQDDGEIEGDVNHRIQAGWMKWRKASGVLCDAKVPIKLKGKFYRTAVRPAILYGTECWAVKSQHENKVGVAEMRMLRWMCGKTRQDKIRNEAIRERVGVAPIVEKMVENRLRWFGHVERRPVDSVVRRVDQMERRQTIRGRGRPKKTIREVIKKDLELNDLDRSMVLDRTLWRKLIHVADPT

SEQ ID NO: 326 - protein, 1010 aa, synthetic construct
  source 1..1010: note = MG149-10 reverse transcriptase
MDQLRNNVNARSLPGSNALYGSSTVSKEQGPLHRRPDVVKSKQGFPHFRERVWVKKLVHDRRIRFGTWNIGTLTGKSMEIVDVMVRRKINFMCLQETKWTGEKAKELDNSGFKLWYTGKIRSRNGVGIIVDKEWKKDVVDVRRVGDRIIVLKLVVGQDTFNVISGYAPQVGLAEHFKVKFWEDLEGVLQDIPQGEKVFLGGDLNGHVGSVARGFEGVHGGFGLGEMNGEGKSILEFSEALDLSIANTWFKKREEHLITYKSGGTCSQIDFFLIRKSDRKYCLNCKVIPGESLTTQHRVLVMDVRIRDRAKRRSPMVAPRIKWWHLKGEKQGIFQQKIWEGWCGQSQGSANDMWNKMSQEIIKVAKETLGESRGFGPRGKESWWWNENVQSKVRVKKECFKEWSRCRNSETWDKYKIARNETKKAVSEARAQAFDGLYQALGTRDGERSIYRLAKGRERKTRDLDQVKCVKDEEGKVLVHEKDIKERWKAYFHNLFNDGYGYDSSSLDTREEDRNYKYYRRIQKQEVKEALKRMSNGKAVGPDNIPIEVWKTLGDRGLEWLTKLFNEIMRSKRMPEEWRRSTLVPIYKNKGDIQNCANYRGIKLMSHTMKLWERVIERRLRKETQVTENQFGFMPGRSTMEAIYLLRRVMEQYRMAQQDLHLIFIDLEKAYDRVPREILWKALEKKGVRVAYIRAIQDMYDRVSTSVRTQGGESDDFPITIGLHQGSTLSPYLFTLILDVLTEQIQEIAPRCMLFADDIVLLGESREELNERLETWRRALETHGFRLSRSKSEYMECKFNKRRRVSNSEVKIGDHIIPQVTRFKYLGSVIQDDGEIEGDVNHRIQAGWMKWRKASGVLCDAKVPIKLKGKFYRTAVRPAILYGTECWAVKSQHENKVGVAEMRMLRWMCGKTRQDKIRNEAIRERVGVAPIVEKMVENRLRWFGHVERRPVDSVVRRVDQMERRQTIRGRGRPKKTIREVIKKDLEINGLDRSMVLDRTLWRKLIHVADPT

SEQ ID NO: 327 - protein, 1010 aa, synthetic construct
  source 1..1010: note = MG149-11 reverse transcriptase
MDQLRNNVNARSLPGSNALYGSSTVSKEQGPLHRRPDVVKSKQGFPHFRERVWVKKLVHDRRIRFGTWNIGTLTGKSMEIVDVMVRRKINFMCLQETKWTGEKAKELDNSGFKLWYTGKIRSRNGVGIIVDKEWKKDVVDVRRVGDRIIVLKLVVGQDTFNVISGYAPQVGLAEHFKVKFWEDLEGVLQDIPQGEKVFLGGDLNGHVGSVARGFEGVHGGFGLGEMNGEGKSILEFSEALDLSIANTWFKKREEHLITYKSGGTCSQIDFFLIRKSDRKYCLNCKVIPGESLTTQHRVLVMDVRIRDRAKRRSPLVAPRIKWWHLKGEKQGIFQQKIWEGWCGQSQGSANDMWNKMSQEIIKVAKETLGESRGFGPRGKESWWWNENVQSKVRVKKECFKEWSRCRNSETWDKYKIARNETKKAVSEARAQAFDGLYQALGTRDGERSIYRLAKGRERKTRDLDQVKCVKDEEGKVLVHEKDIKERWKAYFHNLFNDGYGYDSSSLDTREEDRNYKYYRRIQKQEVKEALKRMSNGKAVGPDNIPIEVWKTLGDRGLEWLTELFNEIMRSKRMPEEWRRSTLVPIYKNKGDIQNCANYRGIKLMSHTMKLWERVIERRLRKETQVTENQFGFMPGRSTMEAIYLLRRVMEQYRMAQQDLHLIFIDLEKAYDRVPREILWKALEKKGVRVAYIRAIQDMYDRVSTSVRTQGGESDDFPITIGLHQGSTLSPYLFTLILDVLTEQIQEIAPRCMLFADDIVLLGESREELNERLETWRRALETHGFRLSRSKSEYMECKFNKRRRVSNSEVKIGDHIIPQVTRFKYLGSVIQDDGEIEGDVNHRIQAGWMKWRKASGVLCDAKVPIKLKGKFYRTAVRPAILYGTECWAVKSQHENKVGVAEMRMLRWMCGKTRQDKIRNEAIRERVGVAPIVEKMVENRLRWFGHVERRPVDSVVRRVDQMERRQTIRGRGRPKKTIREVIKKDLELNDLDRSMVLDRTLWRKLIHVADPT

SEQ ID NO: 328 - protein, 972 aa, synthetic construct
  source 1..972: note = MG149-12 reverse transcriptase
MKSKQGFPHFRERVWVKKLVHDRRIRFGTWNIGTLTGKSMEIVDVMVRRKINFMCLQETKWTGEKAKELDNSGFKLWYTGKIRSRNGVGIIVDKEWKKDVVDVRRVGDRIIVLKLVVGQDTFNVISGYAPQVGLAEHFKVKFWEDLEGVLQDIPQGEKVFLGGDLNGHVGSVARGFEGVHGGFGLGEMNGEGKSILEFSEALDLSIANTWFKKREEHLITYKSGGTCSQIDFFLIRKSDRKYCLNCKVIPGESLTTQHRVLVMDVRIRDRAKRRSPMVAPRIKWWHLKGEKQGIFQQKIWEGWCGQSQGSANDMWNKMSQEIIKVAKETLGESRGFGPRGKESWWWNENVQSKVRVKKECFKEWSRCRNSETWDKYKIARNETKKAVSEARAQAFDGLYQALGTRDGERSIYRLAKGRERKTRDLDQVKCVKDEEGKVLVHEKDIKERWKAYFHNLFNDGYGYDSSSLDTREEDRNYKYYRRIQKQEVKEALKRMSNGKAVGPDNIPIEVWKTLGDRGLEWLTELFNEIMRSKRMPEEWRRSTLVPIYKNKGDIQNCANYRGIKLMSHTMKLWERVIERRLRKETQVTENQFGFMPGRSTMEAIYLLRRVMEQYRMAQQDLHLIFIDLEKAYDRVPREILWKALEKKGVRVAYIRAIQDMYDRVSTSVRTQGGESDDFPITIGLHQGSTLSPYLFTLILDVLTEQIQEIAPRCMLFADDIVLLGESREELNERLKTWRQALETHGFRLSKSKSEYMECKFNKRRRVSNSEVKIGDHIIPQVTRFKYLGSVIQDDGEIEGDVNHRIQAGWMKWRKASGVLCDAKVPIKLKGKFYRTAVRPAILYGTECWAVKSQHENKVGVAEMRMLRWMCGKTRQDKIRNEAIRERVGVAPIVEKMVENRLRWFGHVERRPVDSVVRRVDQMERRQTIRGRGRPKKTIREVIKKDLEINGLDRSMVLDRTLWRKLIHVADPT

SEQ ID NO: 329 - protein, 827 aa, synthetic construct
  source 1..827: note = MG149-13 reverse transcriptase
LEGVLQDIPQGEKVFLGGDLNGHVGSVARGFEGVHGGFGLGEMNGEGKSILEFSEALDLSIANTWFKKREEHLITYKSGGTCSQIDFFLIRKSDRKYCLNCKVIPGESLTTQHRVLVMDVRIRDRAKRRSPLVAPRIKWWHLKGEKQGIFQQKIWEGWCGQSQGSANDMWNKMSQEIIKVAKETLGESRGFGPRGKESWWWNESVQSKVRVKKECFKEWSRCRNSETWDKYKIARNETKKAVSEARAQAFDGLYQALGTRDGERSIYRLAKGRERKTRDLDQVKCVKDEEGKVLVHEKDIKERWKAYFHNLFNDGYGYDSSSLDTREEDRNYKYYRRIQKQEVKEALKRMSNGKAVGPDNIPIEVWKTLGDRGLEWLTELFNEIMRSKRMPEEWRRSTLVPIYKNKGDIQNCANYRGIKLMSHTMKLWERVIERRLRKETQVTENQFGFMPGRSTMEAIYLLRRVMEQYRMAQQDLHLIFIDLEKAYDRVPREILWKALEKKGVRVAYIRAIQDMYDRVSTSVRTQGGESDDFPITIGLHQGSTLSPYLFTLILDVLTEQIQEIAPRCMLFADDIVLLGESREELNERLETWRRALETHGFRLSRSKSEYMECKFNKRRRVSNSEVKIGDHIIPQVTRFKYLGSVIQDDGEIEGDVNHRIQAGWMKWRKASGVLCDAKVPIKLKGKFYRTAVRPAILYGTECWAVKSQHENKVGVAEMRMLRWMCGKTRQDKIRNEAIRERVGVAPIVEKMVENRLRWFGHVERRPVDSVVRRVDQMERRQTIRGRGRPKKTIREVIKKDLELNDLDRSMVLDRTLWRKLIHVADPT

SEQ ID NO: 330 - protein, 1010 aa, synthetic construct
  source 1..1010: note = MG149-14 reverse transcriptase
MDQLRNNVNARSLPGSNALYGSSTVSKEQGPLHRRPDVVKSKQGFPHFRERVWVKKLVHDRRIRFGTWNIGTLTGKSMEIVDVMVRRKINFMCLQETKWTGEKAKELDNSGFKLWYTGKIRSRNGVGIIVDKEWKKDVVDVRRVGDRIIALKLVVGQDTFNVISGYAPQVGLAEHFKVKFWEDLEGVLQDIPQGEKVFLGGDLNGHVGSVARGFEGVHGGFGLGEMNGEGKSILEFSEALDLSIANTWFKKREEHLITYKSGGTCSQIDFFLIRKSDRKYCLNCKVIPGESLTTQHRVLVMDVRIRDRAKRRSPLVAPRIKWWHLKGEKQGIFQQKIWEGWCGQSQGSANDMWNKMSQEIIKVAKETLGESRGFGPRGKESWWWNENVQSKVRVKKECFKEWSRCRNSETWDKYKIARNETKKAVSEARAQAFDGLYQALGTRDGERSIYRLAKGRERKTRDLDQVKCVKDEEGKVLVHEKDIKERWKVYFHNLFNDGYGYDSSSLDTREEDRNYKYYRRIQKQEVKEALKRMSNGKAVGPDNIPIEVWKTLGDRGLEWLTELFNEIMRSKRMPEEWRRSTLVPIYKNKGDIQNCANYRGIKLMSHTMKLWERVIERRLRKETQVTENQFGFMPGRSTMEAIYLLRRVMEQYRMDQQDLHLIFIDLEKAYDRVPREILWKALEKKGVRVAYIRAIQDMYDRVSTSVRTQGGESDDFPITIGLHQGSTLSPYLFTLILDVLTEQIQEIAPRCMLFADDIVLLGESREELNERLETWRRALETHGFRLSRSKSEYMECKFNKRRRVSNSEVKIGDHIIPQVTRFKYLGSVIQDDGEIEGDVNHRIQAGWMKWRKASGVLCDAKVPIKLKGKFYRTAVRPAILYGTECWAVKSQHENKVGVAEMRMLRWMCGKTRQDKIRNEAIRERVGVAPIVEKMVENRLRWFGHVERRPVDSVVRRVDQMERRQTIRGRGRPKKTIREVIKKDLEINGLDRSMVLDRTLWRKLIHVADPT

SEQ ID NO: 331 - protein, 555 aa, synthetic construct
  source 1..555: note = MG151-1 reverse transcriptase
QLPPTDLIAHEIPLKLGAKPHAAKAGLYTKDEMKWMEEKFPRLQDGGVICLCSSPWSSKVKFVAKKTGKLRMVNVFVPLNNATEKVTYPMVRQEQVLDTVFKPGYNVYFTCDGSNAYWGIPIVERDQYKTAFNTPFGQFCMRRMGQGLTGAPFTYARFANTVFGPISETTPGAGDGEEQLDGDHSGANVLKSDAQRNIEQSEGQLGFNFSHFIDDTYGSTASFDEMASFLHRKFFPRIHFARMCLNAEKSEFFMPAITILGYRGGSEGIAPEERKKKLFQHYPVPTNAEELEAFCYLTPYLRRFIPGRAEHVRILKEALVEEKAKVSTATGEKEITKYMFIWTDRQQRSFESICQAIIKNTIFPVNPTLQVHVAADASQRGMGAVVFQLPGHPVGTKLTLSNRKDMRIIEYISQKFTPAESRYTNSEREAVALVKALREARLVVLGSPYPILAYTDHSTLTTLLNSDSVKGRIANWQTQLSEYDLRIVHILAKEMVLADGLSRLPDKVMESPSPEPDEDPEAQGLHLLRHDEGVQEVKDNYRCEVERTGARWIAS

SEQ ID NO: 332 - protein, 678 aa, synthetic construct
  source 1..678: note = MG151-2 reverse transcriptase
DKVFPTKNGAPRIMTEFVDRPYKFELRDEYTTGRNPRPLPSIKAMYYHGKPATQKVLEHFVRSTPVVSRCDNPRCLSRLVIVPKRDPGALKSADPTSYRVTMNALINECLKPTPSTLPLALNEIKKLHHYKYFLKVDAANAYWSIPLDDESRRMTAFQTHEGVFAWDRLTMGTRPASTVQQTAYYRAFDRYLPKELRHRYATFADDVAAGADTLEELFDLLKAIVICFQKAGIQVKASKLIFGVTEISFHNYTISKDQTRPKDENLDPIKNCAIPENVTNVKAFLGCTQQMAHYCQYYGLVAAPLHELTRDKVVFPKPWLAGTAYDISFNRLKSMMLNENLFLWNKVSGRRLFIEVDACDMQHEDEGRHRLLSKEPKRVVEWMSKAWTAHERELPCFYREALARLLCLEHFRNLIETQDVNAGTTIYTDHAPSTYKGSLSNKGRLSSWRIHETQDLADMVQTLYKAGAHLSPPHGLADSLSRLPRGQGFYRLQLPAVLDILLENLPTSVKELPNIRVNAEKDTVLAARIVQRWRKPRNPISIVRADAAGPCDFVILAPFADKITHKIASLIKMNRPFAALVPIDLLQEIDRGANCKVDEEVRKRRKQMPCIIISPLSLAWLVSHPEHTLLEKPSLVLFSQQSKEGTVTESGVLQSPDPSQDYLDFVDKSLMSLDALMK

SEQ ID NO: 333 - protein, 698 aa, synthetic construct
  source 1..698: note = MG151-3 reverse transcriptase
DKVFPTKNGAPRIMTEFVDRPYKFELRDEYTTGRNPRPLPSIKAMYYHGKPATQKVLEHFVRSTPVVSRCDNPRCLSRLVIVPKRDPGALKSADPTSYRVTMNALINECLKPTPSTLPLALNEIKKLHHYKYFLKVDAANAYWSIPLDDESRRMTAFQTHEGVFAWDRLTMGTRPASTVQQTAYYRAFDRYLPKELRHRYATFADDVAAGADTLEELFDLLKAIVICFQKAGIQVKASKMIFGVTEISFHNYTISKDQTRPKDENLDPIRNCAIPESVTNVKAFLGCTQQMAHYCQYYGLVAAPLHELTRDKVVFPKPWLAGTAYDISFNRLKSMMLNENLFLWNKVSGRRLFIEVDACEYAFDLSLGACAYQYADEPTDMQHEDEGRHRLLSKEPKRVVEWMSKAWTAHERELPCFYREALARLLCLEHFRNLIETQDVNAGTTIYTDHAPSTYKGSLSNKGRLSSWRIHETQDLADMVQTLYKAGAHLSPPHGLADALSRLPRGQGFYRLQLPAVLDILLENLPTSVKELPNIRVNAEKDTVLAARIVQRWRKPRNPISIVRADAAGPCDFVILAPFADKITHKIASLIKLNRPFAALVPIDLLQEIDRGANGKVDEEVRKRRKQMPCIIISPLSLAWLVSHPEHTLLEKPSLVLFSQQSEEKTVIESGESQFPDPSQDYLDFVDKSLMSLDALMK

SEQ ID NO: 334 - protein, 691 aa, synthetic construct
  source 1..691: note = MG151-4 reverse transcriptase
DKVFPTKNGPPKILTMYKDKPYEYELRNEFKSGSLQLPTVRSFDWDGKPATSKIIRDFIASTPVVSPCAHPRCISRLVIVPKLDPGQSKESLEHGFRVTVNALFNKCLKPAASTIPLATSEIKKLHNKKFFAQIDGLSAFWSIPVGEESKRLTAFHTPDGIYCWDRLLMGARPSSAVQQSAYLKALDDWADKIYHEHFPTEKDKHGLGPSIRARYASYCDDLACGADTLEQLYVLFFVLIEVCAKAGIQVKASKAKFGVEEITFHNYLINSTSTRPKQANLCPIRNFGIPRDVHQVKSFLGMAQQLSQYIELYSIIAHPLHALTKGDGSKFPKPWITGSPYDLAFHRLKAALLDPNRFLWHKEKSKRLFIECDASDLGFGAAAYQYANVISEVGEEEGLARLKDTSYKRVVEWMSKAWSTDQLKLPVFYRESLARLIVLEKFRNLIESNYELGTTVYTDHLPALFKSSLSNKGQLSEWRINEVQDLNSIVQTLYKKGPLLVLSDALSRCCQPETDLYDNDMPRKLAVLLDRLPDRIKHCKHIRVHYNKDTAAAGRIVQRWRTPKNPVSPVAPASTTLVDFVIAFPLDKGTLTIKDMLLRGQHFAMLIPVSTLCKIAQCPATCAILPHVQTMVDARPKIIIISAENLVWIMHFGDNNDCVQAQILLNAHGPIDDGNFGCGHEEAIEIMNARA

SEQ ID NO: 335 - protein, 553 aa, synthetic construct
  source 1..553: note = MG151-5 reverse transcriptase
DSVFPTKNGSPKILTKFIDHPYSYELLPEYERGEKKMPCTKAMNWEGKTYSSLVIRGFIRGTPVVEKCSNPRCISRLVIVPKLAPGQSKTDPNHGFRVCVNALVNKFLKPCASTIPLAADEITKLFNCKYFLQLDGMNAYWSIPVCEESKRLTAFHTPDGVYCWNRLLMGAKPSSAVQQSAYLEALDQYIDYDHNGQVRQCLLDKDGKRLLDSNGSPKTLRHKFAVYCDDIAAGANTLEELYDLYEALLCCCAKAGIQVKAAKIKFGVREVTFHNYTISEHGMKPKDANLCSIRNLGIPTDVTQVRAFLGCAQQMAGYCKELQIISAPFHKLTKKTTQFPKPWLSGVDYDLAFHRVKALLLDEKLYLHHNDPSKILFIEVDASDVGWGACAYQMRVPFEGDPKDEARMRVGDTGPRNIIQWVSKAGQIMNQGWTDHELKLPVFYRETLARLLVLERFRNLIETNISAGAALYTDHKPGLFEESLSNKGQLSAWRIVETADLQSIVEHHYRQGPKMLLADPLSRICAPSSGFYDPSLPSKFQALTKYLPESIKQ

SEQ ID NO: 336 - protein, 743 aa, synthetic construct
  source 1..743: note = MG151-6 reverse transcriptase
NSVFPTKNGSPKILTKFVNHPYSYELLPEYERGEKKMPCTKAMNWEGKTYSSLVIRNFIRGTPVVEKCSNPRCISRLVIVPKLAPGQSKSDPNHGFRVCVNALVNKFLKPCASTIPLATDEITKLFNCKYFLQLDGMNAYWSIPVCEESKRLTAFHTPDGVYCWNRLLMGAKPSSAVQQSAYLEALDQYIDYDWDGNIRKCLLDKHGKRLLDSNGSPKTLRHKFAVYCDDIAAGANSLDELYDLYEALLCCCAKAGIQVKASKVKFGMKEVTFHNYTISEHGVTPKDANLCSIRNLGIPSDVTQVRAFLGCAQQMAGYCKELQIISAPLHKLTKKATQFPKPWETGTDYDIAFHRVKALLLDERLYLHHKNPLKILFIEVDASDVGWGACAYQMREPFEGDPKDEARMRVGDTGPRNIIQWVSKAWSDHELKLPVFYRETLARLLVLERFRNLIETNITAGAALYTDHKPGLFEESLSNKGQLSAWRIAETADLQSIVEHHYRQGPKMLLADPLSRICAPSSGFYDPSLPSKFQALAKHLPESVKNIKTIRLYANKDTAALSRHVQAWRTPTNPISQGRLGSTEFVDNSNVFFIGVCHAEKSVDEIKELLSSDKQFAVLLPTGLLSEISRGENDDDKETFNSVIEKQIHSLSKIVLSQEGETWLIRVNDQPRIVEVLTAEQVGCDEVDATCIFESSLEELITQVTILPDWQEHNSEIAEERETHVGEACSPPAARRSSRNKRA

SEQ ID NO: 337 - protein, 506 aa, synthetic construct
  source 1..506: note = MG151-7 reverse transcriptase
GYTGQRDSRCTVVRANHPSAELPFAKELIDAEIAGELAKGRMAGPFALPASAQHRRQRGDHMWSSPAVPFAFFMTSPVAVVPKPGGDGWRIIDDLSKGDNAVNASIDEKVVKLRYEQFQAALDMVVKLGRGCELAKIDWKSAFRQIAVHADDCCVLGISWRGKLFFRLVLPFGIRSAPFLFTEYAAALIWKMRSLGFDVTYYLDDILLGGAKGTGKCAAAVAELERLGAKLGIQYHPTKRDGPTTTIVFRGIGIDTIRMVLFIPEDKVVKANRAIAAVLSAHNRHAFLKQLQKCVGLLNFLAMAVPNGRAMMRRLYAFFKKKYAESAEEFTIPVEVWEDLVWWQQCVQFTHQRTIFPIVAAEDSFQIHTDACQTGGGAVLFDRSFRIVGWFAFPWRSLPLSESMMASMPALEAFAFVVALLTFSPAIAGRRLLLSSDALTAVDALAWESSSSQHLTVLLRVAYATAINSSVLLRVVHIQGTRNILADKASRLFVDDDVQAMQQRRQ

SEQ ID NO: 338 - protein, 567 aa, synthetic construct
  source 1..567: note = MG151-8 reverse transcriptase
VSLDYDGQRTATVVNKNSTRQLVYNKNGLPSDPIPEYATSATKLLNVISHEVQEKLYLGPFTREEAEKKFGIFISSSIFGIEDLSRSTTKIRLIHNLSSSFFSVNNFVETEFTHTLDYTKLFFEALHNVANLSPSVWFACLDISRGYRRFRVRHQDIPLQGLSVPITTTTTVPSFDGTTSGVRQLLQGAEYFYFDTAMPFGARSAPQNFCTVSIAIRDLVRELAANGSIPGYLLTYVDDFSALAPTEADASYFLDTLRAILTEVNLPENPSKAQPSSLMTQYLGLEYDGVKLTATLPKLKRQLYIKYLQYFIDTRRIKWSDLNSLVHRLRHAASVLRAGKPFFSNLLVKLKSSKANANHYVTLSDRDRDDIRWWLHLLRHHKPQVVIGPSHWSSLESVGLYTDASKRGFGAYFTFNGSYFNGPFTPLEIAAFESNQVSIAEFELVVLCFAISTWGHLLAGKRLTFYCDNLPSVYSVNSQSSTIIVRVALLRHLFAIAAIHSIDVQSIWLGTKTNIIADSLSRFDMKTFHRLTKNVHTKQHQHPILTSRALLLTPDGRENPSNPEWRP

SEQ ID NO: 339 - protein, 709 aa, synthetic construct
  source 1..709: note = MG151-9 reverse transcriptase
VALEYDGQRDDTVVCKTRSKGLIVQKGAMPDAEVPDPITSAAALLNVVNKGVTNKTYMGPFNREEAIEKFGVFIASEVFGIEDTTRSTTKIRLIHNLSSRLFSVNDFVSGEFSHTLDYTKMFFAALSDIAATTPAVWFGCLDISRGYRRFRTRHQDIPMQGLNLPILSSSSVPFFDGDTTSTRHVAAGDELFWFDVTMPFGSRSAPRHFCAVSIAVRDIVREIALNAGVPGSILCYVDDFAALAPTKEAASFFMATLRSLLLAIGLPEEPSKAQPVSTTIRYLGVDYDGELCTATLPQVKRELYIRYLSYFVATTRRIKWKHLDQVVHRLRHAASVLRAGKPFFSSLLQTLRSRAHGSGGAARLERATGLRHGRVQHRGAYIKLSSTDKDDMRWWIHILSHHPPMTVIGPDHWITAADASIYTDASKLGFGAFFNGRWFNGSFTPTEIAAFEAQTVTINEFELLAVVFAISTWAHLLTARRILFYCDNSASVASVTTQQSRVPVRSALLRHLYAIAAIHSIDLKIVWLGTKTNIIADALSRFDIPLFQKITQDRFMLHHENEPALASRLLLFDPAGPQNPSSPEWRPMASISALSKQGSSAPLPPPLPLPLPHPLPHPLSPHPLNHHPLPAPTPLDCFETEEDALLHEFFKLVFTTEKMVSSHPSDWKSRSPSLPANVRAATFLALSDGQDFLLDMHLAKGSRALRHRA

SEQ ID NO: 340 - protein, 514 aa, synthetic construct
  source 1..514: note = MG151-10 reverse transcriptase
FTHKPYQKLVPHPYRFSSEIEDKIDKKINKYLEQNIMELADHENGEFISNIFFKEKPDGDIRILLNLTECNEYIPDRHFKMEEVRTVMSLIKQNCYMASVDFKDAYYCVRVHPKYRKYLRFFWKGKLIQYTCLPNGVKCAPRKFTKTTKPVIRKARENEASVSSFLDDTFIEGDNLLEAQKNVMTTVKIAEKAGFIPHPVKSQLDPKQILDHLGFTFNSLNMTVKITHKRLLKILEMCKNLIKKYQNKSHIKIREIASLSGSLVATFPGNQYGKLMYRKIDNFKNAKLRQNHINYSAKVMLNYNIAKEIEKVITELPSAYAPIIRENPDIILESDSSDIGWGGCFGDKNETGGSWTKSEIDSKNNYLELKAACFTILCFCKNIKNKHILIKSDNTTAVAYLNNQGGRIFKLNVLANEVWSWAQQTHNFITAEYLPGEENFRADKISRTMQSNIEWSLDQEIFTEITKEFGDPSIDLFASRLNNKKPDYFSWKPDPHAKNTNAFLQKWGTKLAYA

SEQ ID NO: 341 - protein, 511 aa, synthetic construct
  source 1..511: note = MG151-12 reverse transcriptase
QFCPNPSFPSPVISCPSCPLKYKALKDQINEYLSSGAITKVDPDESQILSRIFSVKKSNGKNRTILDLSKINTQIIHVSFKMETYINIMEIIQPRDYLASIDLRDAFFAVNLHNDSKRFCCFEFNGDRFQFEVLPFGLTCSPRIFSKVLRPAIIHLRSLGIRILSYLDDIFLCATSVSLLYEHIQLTLNLLISLGYAPNFEKSNLTPSNELMHLGFIWNSSNMTISIPSEKILKVQKFASSILRSSPTLRTLSSFLGLLVSFRPGYFLSPLHYRNLQLQLCALIKRGYNWDDKVTLNEKSVTDISWWSSCPNPLPSFYFGIFIPDVTLSTDSSLTGWGGVLSSGQSVKGSWSTSESKNHINFLELKAIEFCIRSFLPIIRNKSLSIQSDNMTSVFYMNKVGGTHSKPLCLLALSIWQLLMDNNISCKTFHIAGSDNINADFYSRSTKLDNDYSLTQYAFNSLLSHISFTPTLDLFASRLTHKLKSYISYHFDPFSVSSDAFTLKWPNNIYL

SEQ ID NO: 342 - protein, 509 aa, synthetic construct
  source 1..509: note = MG151-13 reverse transcriptase
PFAEYPPSCFLANNRSAFQHPDFVTQAISELLANGCIVEHSVPPFCVNPLSVAEGKKLRLVIDLRHVNSFLVRFKFKYEDLRSLSQVLEEGQWFFTWDLKSGYHHVDICLEHQMYLGFSWPFSGMLRYFTFTVLPFGLSSACFCFTRLLRPLVSRWRSMGHNSFIYLDDGLGSHPDKCSAAAAAMIQKKELNSAGLLVNEEKFHWHPMQVGEWLGLVINTITMSFHIPERKVEKLKSLLSSAIGDASSSYRELARIAGSIIYVALAVGPISRLLTRQMYLAIESRSAWDHTLRFSPALLEELRFWYNNIDSFNGYSLRPPPDSSMVVFSDASDVAFGGFSASLDGVVASGMFTSEDLSQSSTYRELKAIYYVLLSCAEQLRQKRVKVLTDNQGAARIVSVGSSKVHLQSVAMSIFDLCLSNRITLEAQWIPRSQNEKADLLSRFVDKDDWCVNPSVFRLLDAKRGPHTFDRFATYYNAQLPRFNSKFASPGCSGVDALAQDWSSENNWI

SEQ ID NO: 343 - protein, 517 aa, synthetic construct
  source 1..517: note = MG151-14 reverse transcriptase
PFFELPTPFLKANNASALSNSSFVSKAVNELLQANLVEEIFCVPDIVNPLSVSTRSFGKQRLILDLRHVNSFIFKQRFKCEDLSVAIQIFDQGFHLFKFDLKSGYHIEIFPAHQKFLTFAWDFGTGSLRYFQFCVLPFGLSSAPFIFTKMFKPLLKSWRSRGIPIAIFLDDGLGGGTDPVSAKINSLVVHSDLLKSGFVPNEDKSQWEPIQIITWLGVILNTIDGSIKATDERIAKLSHDLETLSTHQHPTRVHVKCVASIAGQIISLSSCVGPVARIMTRFLFSAISSAVSWDCEVLLTQDAISEIDFWRHNVHALNGKVYWGAKSLPAKITFSDASDSACGAFVQLQPGVELVSHKNWSIAESAQSSTWRELKAVCLALEAFASHLSCSKVVWYSDNQNVASILLNGSRKADLQLLAIQAFHICLQFRISLVPQWIPRDLNSRADLISRLIDFDDYELNDVIFQGLDELWGPHTVDRFACNYNAKLPRFNTKFFQPGSEAVDAFCQDWRFNSNWL

SEQ ID NO: 344 - protein, 517 aa, synthetic construct
  source 1..517: note = MG151-15 reverse transcriptase
PFFELPTPFFKANNASALSNGSFVSKAVNELLHANLVEEIFCVPDIVNPLSVSTRSFGKQRLILDLRHVNSFIFKQRFKCEDLSVAIQIFDQGFHLFKFDLKSGYHIEIFPAHQKFLTFAWDFGTGSLRYFQFCVLPFGLSSAPFIFTKMFKPLLKSWRSRGIPIAIFLDDGLGGGTDPVSAKINSLVVHSDLLKSGFVPNEDKSQSEPIQIITWLGVILNTIDGSIKATDERIAKLSHDLETLSTHQHPTRVHVKCVASIAGQIISLSSCVGPVARIMTRFLFSAISSAVSWDCEVLLTQDAISEIDFWRHNVHALNGKVYWGAKSLPAKITFSDASDSACGAFVQLQPGVELVSHQNWSIAESAQSSTWRELKAVCLALEAFASHLSGSKVVWYSDNQNVASILLNGSRKADLQLLAIQAFHICLQFRISLVPQWIPRDLNSRADLISRLIDFDDYELNDVIFQGLDELWDPHTVDRFACNYNAKLPRFNTKFFQPGSEAVDAFCQDWRFNSNWL

SEQ ID NO: 345 - protein, 516 aa, synthetic construct
  source 1..516: note = MG151-16 reverse transcriptase
PFYYTPTSVHLLNNKSALNYSDFVVNAITELLKVGSVVECPFPPVVVNPLPVSVQSNGKKRLILDLRHVNFFVKKSKIKFEDAKSFLECLLARPTAWACSFDIKSGYHHIEIFESDQQFLGFSWVFKGVTKYFKFTVLPFGLSLGPYIFSKVMRPLVKYWRSKALSIVVYLDDGISAAQSFSKCEEHSLLVRSDLFKSGFVPNKDKCQWVPIQVICWLGIFWDFKNNRMFIPPEKISRIFHELVEVMSCRSVSARKLVRVTGRIISNFLIMGDVCKLMTKAMHRLIERRNGWDAHVVLDSDVLIELKFWREHLQSLNCRPIWRKHTLPSRVVYSDASAVGCAAFISMNDRPVSHKNWDAIEIKQSSTWRELMAMCVKHSLQSFVHLLKGGHVKWYTDNQGVAAIVKSGSTKVHLHKLAMEMFSLSKEHDVRIDIEWIPRSDNEVADYLSKIVDFDDWSVKDSYFQAVDSTWGPFTVDCFANSVNAKVSRFYLLFFQPGSLGVDSLAFDWGQENCWL

SEQ ID NO: 346 - protein, 509 aa, synthetic construct
  source 1..509: note = MG151-17 reverse transcriptase
PFTCTPPPMKFKNYKSAIENNVFVDEAVSEFINNGCIQEVPFQPFVVNPLSVAIQKSGEKRIILDLSELNVYVAKNKIKFEDWKVALQFFERDCYMFKFDLTSGYFHLDICIEQQTYLGFSWNNTFYCFSVLAFGLTSAPYIFTKCLRPMVKYWRENGVNIVLYLDDGFDLAEGYLECKNKSDFVKLSLKQAGILVNEGKYIFEPVQSLEWLGLIWNSKAFSLKIPERRISDTIESLEKLLKLFPYISALTIITICRLSNFNVACNGQCYYFNDETFVFCYRKQTSWDSRLKVSDTNFVFEELLFWSGNLCTLNQNTLLNDSLPCTIVYSDASNVAGGAYTVEMNEKVFHQMWDEFEKNMSSTWRELMAIHVALHSFKSELQNKRVKWHTRQSELCIINKGSTKKHLQYLAYDIFKICSNVGITLNPIWIPRSENCKADFISKMIDIDDWQTSLEFFSFMNQLWGPYTVDRFANFYNAKLVRFNSKFWNPGSEAVDAFSQDWNNENNWI

SEQ ID NO: 347 - protein, 586 aa, synthetic construct
  source 1..586: note = MG151-18 reverse transcriptase
QWATGSPPRPFSQAPRLVDEAHCAWLLDKIQEGLETGAHGPLPLRRGRPDARWLSPAHVTTSAGKHRLVVAYTRLNDACQSATCRYETIEHLVDLLTPSSWLFSCDLSAAYHHCAIHKSHRKYTGFHFALPYRARGQILPLQVGGYYVYAPGASAATEPLYQVVELCAYALNFGARASPLVFTKHMRTLVKYLRKHAIGVVIYLDDLAFVVEGSQQAALRARDFIEQCIRSAGLTRHPSKGQFLCAQQVLEDHLGFRIDIPNNSLSIPERRCKKIRQLAVALRCEVARNRRLVPTQLLQQFCGAACSTSKAVPSARLHLRALYDCTSLHRPLSRLNRTALHDLHFWAELRPGNPANGVPLFKSPTSQVLYTDASGGTGWGGVLPAEPARRALCQARAQMPFADAASLHHAANIPCPEFLTGRTCAGFWDADTLPLHVTYKELHAFHRALRVWGPQLSQSRVLLFCDNQAVVSLLRHGSSRSAQLMAELRVVWKLLLDFGITLDPVYIRSANNPADAPSRYRDSSDWTFRPGLRRRLRDLWRSPFSLDPFATAATAMARNFCSLRDEEQHTAADGFSVSWSGHDLFL

SEQ ID NO: 348 - protein, 556 aa, synthetic construct
  source 1..556: note = MG151-19 reverse transcriptase
TWKKGPPKPFNHGVSLRELDLVSNQREFLKTETTRALGVGAWEPATCDRYVSKCFLVPKPGNKWRLVMDFRWLNSHCVDRRVKFETLKTLSRMAHKGDYMFSFDLQDGYHAIGIAPEDRKYFTFNLNGRLLQCSALPFGWNASPYVFVKTMKTLVQTLRSPTGVQDMAALQSLQDGPNRVGGRGTARFSHLTRQGGKNRPAVRGLRVLPYMDDFLVLAKTRKLANLAKLRVEAVLQELGLRRNVAKGHWDVTQRLEHLGMMVDTKTGLFQVTPSRMHKIRTLARETICLATRTNRLIPARQLARFTGLAQCVYLAVPPARHFLRELHNCVREKSSWSDRVRLTRQALRDLQWWVDLPAKWNGRAIWRSPISAVLHSDASMTGWGAVLNETTPARGFWNRQERKLHITELELEAVYNAVRSFLPHLRGRSVFVHEDNQAVVHMLAHYSTRSPSIMRRLRKLWLLLDLNDISLSRVEYIRSEANVWADALSRELDTEDWRLNPVVFKMLEERFGPHTIDRFASVTSAQLARYNSRWRDPYTEGVDSLHLDWRGENNYA

SEQ ID NO: 349 - protein, 547 aa, synthetic construct
  source 1..547: note = MG151-20 reverse transcriptase
PWTNGGPPPPFNQGVSCRGLPLDQAVFLKQEIERLTLSGVLRPVEHSRWVSRAFLVPKPNNCGWRLIVDLREVNKHCKTRKMKMETLRSLRLIAKPGDHWVSFDLKDGFYSLAIDPKDREAFTVNLDGQLLQFCALPMGWSLSPFVFQKLTEAFTDHLRDPESSTNSPGALAAEKMGPKALKKWRRRRRRLTGARLLPFVDDFAMFGETYEETLQLVVYTFSLLDSLGLKVHPTKGHFLPILVGDHLGMILDFEKGEFRAPIDKLKSVAVLAKTLLCRAAAHKRWVSVKTLASLARKAQFLHLAIPVARFFLRELHDVVKTAKSWSGTVKISCQLKRDLEWWTKVPSHHNGSPVWKPVENAYLHCDSSGYGWGAVLNDCVEARGFWGMPDLNEHITFKELKAVRCAIQAFLPELRGKRLLLHEDNQSVIGVLTHLTSKSPTMMCELRKLFLLIDTYDIKIRTLYIRSAANVWTDNLSRVTDNSDWQLSPRVFRHLSKLWGPHTVDRFASSANRQLPRYNAKWRDGTAEAVDSLHLPDQAWRGEHNWC

SEQ ID NO: 350 - protein, 557 aa, synthetic construct
  source 1..557: note = MG151-21 reverse transcriptase
DFHTRPPPFNQGNSLENLSEEEQAWLDKEVSRNLGSGSWVAATIKTHVTKCFLVPKKVEPGQPKKWRLVIDLRHLNDFCRDKSCKFETLKSLRYLAKPGDWLISVDLQDGFHAIQVRPDHQKYFTFCLQGQYYTSAVLPFGWKGSPAVFVETLQTLTRALRTPAAPTAAGQPVAFLNYLREECHVKHRPRTALSAAYRSPYWAVRLRVLPYMDDDLFLFRSKAEAEAGALQIRATFEYLGLKINEEKSPTLSAPTQELRHLGLLVNTVRGLFLVPKDKERRIRTMARGLKVQALSNRRLLPARLLASFTGLCQSVYLAVPYARLYLRSLHDDLSQKAHWEANVRLSRQSLRDLQWWADLRDQYLGRALWRSPDQAELHSDSSGFAWGGQLDYNLLAQGIWTLDEKRHHITVLELLAVLRNVQAFLPRLRSKTILLHEDNQAVCHILRNFTSRSPVIMLYLRKLILLLDTNNITLRPVYIRSEDNPADAPSRDRAPDEWKLARQLFDRLNATYGPHTIDRFASSATTQVPRYNSRYSDPQAEARNAMTQDWTHEINFI

SEQ ID NO: 351 - protein, 599 aa, synthetic construct
  source 1..599: note = MG151-22 reverse transcriptase
YWNALGPPRPFDKGRSLDALDQEQQQWLEREEERCVSSGAWKRVKGNRYVSRCFIIPKAGLDVLGRRQFRLIVDLRPLNLHCKDFKTRYETLSRLSSVILHGETVSFLSFDIKDGYHFLEIEKKFQCYFGMNIQGRHYQCSALPFGWNGSPFVFNQAMRTLTKLLRSASLPTAESMAEDLSGRQRSQLWGQHALRVGKRKVPVRELDRTTEMSKVRVPWHVLPYCDDYLLTVKGQSRRQRWKNAQRAARRSEKSLNFLGLQRHPQKGQWLKADQGPEHLKDSVRHLGLDVNTEGGRNEYLAPAAKFARIRQAARDLRGRAGRNRRLVPARRLAAFLGLVNSCRLAITPVEMFSRAMHDDLATRASWSANVRLSRQSLRDLSRWIDVPQEWNGAPISQSTVTKVVYSDASDFAIGGVLASEKISDPTRPGLQIPGKRWHRALTLEEQAEGIFVGEMRGLVETIENFAPELTGKVVRFMEDNQAAMFATRRLTSKHPLVMPLLRRLWALLCEHRIRLQHVDYVRSEENPADEPSRWRFSDEWKLSPAVFRWATRELGACTIDMFASRNTAQLPRFGSPWRDSQAAVEDAWSVSWAGEKVWI

SEQ ID NO: 352 - protein, 592 aa, synthetic construct
  source 1..592: note = MG151-23 reverse transcriptase
YWTNGPPRTAWNQGRSCDRLSQEEAEWMEREERRLVDIGAWKRVRHNRFVSKCFLVPKAGLDAQGRKKHRLIMDLRPLNIHCKEFKTRFETLSRLGTVIMEGETVAFVSFDLEDGYFCLQIDPEYQQYFGINIQGRMYQANVLPFGWSTSPYAFCTAMKTLTRLLRAAHLPTAEVVAQSLSGAYVEQCSELERLSGLRVGSTPVRAVELSAAAVQSVRPETDWLPYIDDYLATVRGATEVERAERAEAAKQHAEESLDFLGLRKHAEKSQWVPKPTTDHLGIHVDSTTGQFLATKVTMARIRREAGVLIARAKSNRRLVNSTSVRSFAGLVQSKYLAIAPAQLYLRSLFDDLSKDDWSASTRLSRQSLRDLQMWRDQSASWNGSPISKAPVTRLLYSDASEFALGGNLVEGDLSRVVPERPGLAVPGPRWHRALTLVEQQQGIFVGEIRALVENVENFLPQLRGQVVQLMEDNQAAMYATRRLVSKHPVALRLLRRLWVMLSANRIRLQAVDWVASADNPADAPSRWRFSDEWKLQPAVFRWANREFGPHSLDLFASRNTAQLPRYVTRFPDSKAVTCNAWAHSWVAETSWI

SEQ ID NO: 353 - protein, 554 aa, synthetic construct
  source 1..554: note = MG151-24 reverse transcriptase
PWLRGGPPPPFHHGESLLDATRAQREWLHAETERCLASGAWEPATARSHVSRAFLVPKPSPPGAPPKWRLVVDLRELNRYCRGVGCEYETLRRLQRLARRGDWMISFDLQDGYHAIGIHPDHRRYFTFSLPGLDGVPRYYQCAALPFGWNLSPYVFTKTMRVMVRRLRAPLAPARLPTWRGARGAAARALRLRVGSSHPSSVGMRVLPYVDDFLVLARTRAECFECRRCVERLLARLGLARHPDKGFWEPTQALVHLGLGVDTARGLFVVPPHKQAQISEQATRLLHTAARRRRLVSALQLASLAGRAQAVHLACPSARFYLREIHTVIASRSSWGALVRLSRQALRDLRWWAALPSAGVTRAIWRSPVACVLHSDASRRGWGAMLNSAVPAHGFWTPRERGHHITYLELMAVHRALLVFLEQVRGRSVLLWEDNQAVRHILTAGCSRSPEIMRLLRRVWWLLDSEGIDLRVEYFRSDDNVGADALSRIRPEDETALRRPAFLDLESRWGPHTVDRFAAPGSSLLPRFNSLIPARGVEAVNALAQRWDGENNYA

SEQ ID NO: 354 - protein, 563 aa, synthetic construct
  source 1..563: note = MG151-25 reverse transcriptase
EWTKGPPPAYNEGISFQGKQATQCAAEQAFLEGEIARLLGNGALEDAPLDARTHVCKAFLVPKKVPVGQPPKWRLVIDLRPTNLYCVHRGCKYETLKLLQRLARKGDWAVSFDLQDGFNAVAIHPDDRRYMTFALPPPAGSPPGTPPRYLRCAAMPFGWCASPLVFTKTMRVMVRLLRSPLAPTLERVRMRDRQARRYKVRLKKGQPHETGIRMMMYVDDGLALARTRAEALRCRNRISRVLAQLGLRRHPDKGEWEPVQRLEHLGLDVDFKAGLFLVPPRKIKGLQGQARDIMGEAARERRLIPARRLASFIGYAQSVHLACPPARFYLRALHDCLGSRQSWSSNVRLSRQAITDLRWWRTVGADADVSRAIWRAPEQSTLHCDASHLGWGGVLNMTVPASGMWTNRERGHHITHLELLAVHRSVAAFAKQLQGRSVLLWEDNQAVMHIITNRTTRAPAMMHLLRRLYLLLDTLGISIHSRYIASEQNSLADALSRGSPFDELQLRDAAWTEIETEFGPHTVDRYARLGNARTPVWNGRETAAKGAGAGALSQPWAGENNFV

SEQ ID NO: 355 - protein, 562 aa, synthetic construct
  source 1..562: note = MG151-26 reverse transcriptase
DWIEGPPPSFDHGVSLARPGDLPAAQSAFLEAEIRRCFGTGAWEAAPTDERSHISRVHLVPKKVPPGHPPKWRVVVDLRPTNACCRERGCRYESLAQLQRLANPGDWMISFDLQDGYHQVGIHPEHRRYMTFALPPPPDDPTGPPRYVCCAALPFGWTSSPRVFTKVMRGMVRLLRTPLAPSGADLRQAGAAQRRLVMRVRRRGARDPGDVGMRMLAYVDDFLVVARSRSLALRCRARVEAVLRLLGVQRNPTKGWWEPTQRLEHLGLEVDTAAGLFRIPPRKLLELEGQATRLRRQVMMTGRVPVRQLASFVGFAQSVQLACPPARFYLRALHDDLAARRSWQDSVRLSRQSLTDLQWWRQISAADVARAIWLAPEQAALHTDASHLGWGGLLNDSVPAAGIWTGRSRGSHINVLELLAVHRSLDAFLDKVSGKSVLLWCDNMTVVHILMNRTSRSPVLMQLLRRLWFLIDAAGISLTVRYVSTHDNNAADALSRGSPFDELVLRPSAWTALERRFGPHTIDRYASASNACLPRFNTASPGGGGEGALGLSQRWEGENNFA

SEQ ID NO: 356 - protein, 544 aa, synthetic construct
  source 1..544: note = MG151-27 reverse transcriptase
MTQAQSTFFEAEYQRHFLTGAWESAPPDERTHVCRVHLVPKKVPAGAPPKWRIVIDLRPTNRYCRPMRCRYETLKVLSSLARKGDWCFSWDLKDGYHQIGVHRESRRYMTFAVPPPPGSPPGAPPRYVRSAALPFGWSASPYIFTKVMRVMVRMLRSPMAPALRVARLRTRGGRAFALRLDSHHATAAPSVRGFRVLPYVDDFLAICRTRGECFAARRRAAEVMERLGICRHPDKGYWEPTQRLEHLGIDVDTGQGLFRVPPEKLKKLMDQARAIRGLSAREARLVPARLLAGFIGYAQSVQLACPAARFYLRSLHDVLATRAHWDARVRLSRQALRDLQWWEQIGTAEVSRAIWRSPIDRTLHCDASHLAWGGVLDATVPASGMWTGRACGRHINYLELLAVHHTLQAFGSQLRGQSVLLWEDNMTIVHVLTNRTTRSLELMHLLRRVHYLIDTMGVNLTVRYIASKENSQADALSRGSPHDELVLRPEAFRRLERRYGPHTVDRYATAANAQLARFNTLLPEAGGEAAMALSQQWAGENNYV

SEQ ID NO: 357 - protein, 558 aa, synthetic construct
  source 1..558: note = MG151-28 reverse transcriptase
TWKHGPPQPYNFGVSLRDTTPGQQEWLDKEMDRLLSTGAVEPAPLEECTHVCRVHLVPKKTPPGEKPRWRMVTDLRPTNAACIGQACKYETLRALQRLARRGEWMISWDIKDGYFAVGIRRDHRRYMTFALPPPLGMPGPPRYYRCAAMPFGWLMAPYVFTKVMRVMVRMLRTPTAPSLARLRRSAASGKALVLRLARRGRASGARGLRILPYVDDFLCICPTRRDALHARDRCTEVMDFLGITRHPDKGEWEPTQRLEHLGLDIDTEAGLFRVPPRKVVELMRQARDVLGRAKQEARLIPARELAGFIGYAQSVSLACPPARFFLRSLHDCLSTRTSWDGRVRLSKQALRDLAWWKRFDSADVSRAIWQEPAQSTLHTDASKLAWGGVLDQTVPAQGFWRPRDRSRHITYLELLAVHHTLQTFLARLKGRSILLWCDNLSVVHILENRTSRSPEMMALLRRVWWLLDSAGIDLRVRWISTHENTMADALSRGSPHDELTIDDAAWARLEHRFGPHTIDRYSNVVNARVSKFNTELPHPVSAGAQALSQCWAGENNYA

SEQ ID NO: 358 - protein, 561 aa, synthetic construct
  source 1..561: note = MG151-29 reverse transcriptase
DWLSGPPPPFDHGVSCGRGSLSKEESTFLESETRRLLELGAWEPAPAGERTHISRVHLVPKKVEPGQPPKWRIVVDLRPTNAYCRPRGCRYESLRCLSRLARRGDWMFSFDLQDGYHAVGVHPEHRRYMSFALPPPPGSPPGTPPRYLRTAVCPFGWSASPRIFTKVMRVMVQQLRSPGAATLERLRRRVGGGAAMRLRLGRQGDPWSRGMRVLPYVDDFLCLAASQAEALQCRAMVERVLERLGITRHPTKAVWEPTQRLEHLGLDVDAREGLFRVPPRKLRALMQHARSLRGMACRGRRLLPVRAIAGFVGYAQSVELACPAARFYLRALHDVMATRRGWDSTVRLSPQALRDLSWWAVIGSAEVSRAIWRPPHTRTLHCDASHLAWGGVLDGTVPAQGMWTGRACGRHINYLELLAVYHTVAHFFGELRGEHVLLWEDNTTVMHVLSNRTTRSPHLMHLLRKVWRLLDGAGIALTVRYIPSDQNVLADALSRGSPFDDLRLRGATWRELERRWGPHDVDRYAAPESARLARFNSVLPCGESEGAPALAQCWAGTNSYV

SEQ ID NO: 359 - protein, 562 aa, synthetic construct
  source 1..562: note = MG151-30 reverse transcriptase
DWTQGPPPPYDYGVSLAGRSDLTMQQSEFLEREVTRCFATGAWEEAPESERTHICRVHLVPKKTPPGEPQKWRVVVDLRPTNAYCRQCSCRYETLRVLQRLARRGDWMVSFDLKDGYHAVGIHEEHRRYMTFALPPAPGSPPGAPPRYIRCAALPFGWLASPYIFTKVMRVMVRMLRAPGAATFERLRRRTASGRAAMLRLGSRGDPWVRGMRVLPYVDDFLALAATREEALRCRERIEYVLNRLGITRHPEKGYWEPTQRLEHLGLEVDTEAGLFLIPPSKLKELARRAVGVMTVAAADRRLVPVRQLAGFVGFAQSVELACPATRFYLRELHDVMATRSSWDAKVRLTRQAFRDLRWWRRIATADVSRAIWRPPTDRTLHCDASRLAWGGVLDGTVPAQGMWRGRDRGRHINYLELMAVYLSLQQFYGELQGASLLLWEDNMTVVHVLTNRTTRSPELMHLLRKLWRLLDTAGIKLEVRYIPTDQNTFADYLSRGSPLDELVLRPTAWSALERRWGPHTVDRYATARNTQLRVFNSLLPEPASSGASALAQDWHGENNYV

SEQ ID NO: 360 - protein, 562 aa, synthetic construct
  source 1..562: note = MG151-31 reverse transcriptase
EWIASPPPPFDHGVSCSGPTGITPQQSEFLEKEIARCCATGAWEEAPIDERTHISRVHLVPKKTPPGEPQKWRVVVDLRPTNAFCRPKSCKYETLKVLQRLARRGDWMVSFDMQDGYHCIGIHPAHRRYMTFCLPPAPGSPPGAPPRYIRCAALPFGWSASPMIFTKVMRVMVRMLRAPSVATFERLRRMTRRGQSAALRLGRRGDPWVRGMRVLPYVDDFLCLARTRREALRCRQRIQYVLDRLGLMRHPEKGYWEPTQRLEHLGMDVDTAEGMFRVPPAKLSGLMQQAGAILAIASAARRLVAVRTLAGFVGYAQSVELACPEARFYLRALHDVMATRTSWEARVRLSRQALRDLRWWRHVGTADVSRAIWRAPTDRSLFTDASHLAWGGALDGTVPAQGMWVGRECGRHINYLELLAVYRSVMAFEGELRGSSLLLWVDNMTIVQVLTNRTSRSPELMHLLRKVWRLIDAAGISLTVRWIASKENSLADALSRGSPFDDLEILDAVWAEIERRWGPHTVDRYARPETARCARFNTLLPEAGSEGAMALSQDWHGENNYV

SEQ ID NO: 361 - protein, 562 aa, synthetic construct
  source 1..562: note = MG151-32 reverse transcriptase
EWMRGPPPPYDHGVSLAGPGAMTAQQSEFLEKEVARCFGTGAWEQAPADERTHICRVHLVPKKTPPGEPQKWRVVVDLRPTNAFCRPKSCKYETLRVLQRLARRGDWMVSFDMQDGYHCVAIDESHRRYMTFALPPAPGSPPGSPPRYIRCAALPFGWSASPLIFTKVMRVMVRMLRAPAAATFERLRRQTASGRAAILRLGRRGDPWVRGMRVLPYVDDFLCLAATRAEALRCRERVTYVLDRLGLTRHPDKGFWEPCQRLEHLGLEVDTEAGLFLIPPAKLKELMRQAGALLATAAKEGRLLRVRTLAAFVGYAQSVELACPAARFYLRALHDVMATRANWEARVRLSRQAIRDLRWWRHIATADVSRAIWRPPTDRTLHTDASRLAWGGVLDGTVPAQGFWRGRDRGRHINYLELMAVYLSLERFEGELQGSSVLLWEDNQTIVQVLTNRTTRSPELMHLLRKVWQLIDFAGITLTVRWIASKDNVLADALSRGSPFDDLTLTDEAWRELEWRWGPHTIDRYATAETARVAAFNSLLPEAGSAGAAALAQEWMGENNYV

SEQ ID NO: 362 - protein, 562 aa, synthetic construct
  source 1..562: note = MG151-33 reverse transcriptase
EWLHGPPPPYDHGVSLAGPNAMTAQQSAFLEKEVTRCFATGAWEEAPAAERTHICRVHLVPKKTPPGEPQKWRVVVDLRPTNAFCRPKSCKYETLRVLQRLARRGDWMVSFDMQDGYHCVAIAEDHRRFMTFALPAAPGSPPGSPPRYIRCAALPFGWSASPLIFTKVMRVMVRMLRAPAAATFERLRRQTASGRAAILRLGRRGDPWVRGMRVLPYVDDFLCLASTRAEALRCRERVEYVLKQLGLTRHPEKGFWEPTQHLEHLGLEVDTEAGLFLIPPAKLSELMRQAGAILAIAAKEGRLVRVRTLAGFVGYAQSVELACPAARFYLRALHDVMATRANWEARVRLSRQAIRDLRWWRHVATADVSRAIWRPPTDRTLHTDASRLAWGGVLDGTVPAQGFWRGRDRGRHINYLELMAVYLSLERFEGELQGSSVLLWEDNQTIVQVLTNRTTRSPELMHLLRKLWRLIDHAGISLTVRWIASKDNVLADALSRGSPFDDLTIIDEAWRELERRWGPHTVDRYASAETARVAVFNSLLPEEGSAGAAALAQEWMGENNFV

SEQ ID NO: 363 - protein, 728 aa, synthetic construct
  source 1..728: note = MG151-34 reverse transcriptase
LSEKFVLAQVSFPSTMAPEWQKELASTLIEFSDVLSWHEFDLGKITDVPCRINRKEGWTPAVDGPRRNLKLAHNRQIIQEKSLPLVKLGVFKPAPSTAVDRAQLHIVYRDKSKSPSSARVCHDYRKLNSTIVPDPYPLDTIPDLYAFMSEKEGHHCYFTVDADRGYFQIVNDPDTEQYTAFEMEDQLWITTRLVFGIVTGPAVFARNADALLGDLKHSERVLRNYFDDLVGKAPNEAALIQLLRRLFLRARQKGWKFKPKKLQFGFYDVKVFGNVFSRGTVSLTKERIDAVQALTPPTSVSELRSYLGLINTFRDRVPGFSLRTQALTSLLKLKPDSAGSKNRRPPFVMTPEALEEFSQLKTILLHPAVLQHFQPGRQTFLYTDASLGQRNEEINVPGGLGAVLTQVVDGVEVVCAYLSAGLTSAQRNYAIPRLEALAFVYAVGKFHALLDGVPFTWRTDARANQYLRDARHSSNPVLFRYSLVTQEYQFTVEWVPGLQMIADTFSRMTLVTADGAEALTLPEIVFGRDIGPRVAALSPTATLYTQKAYLPHLLFDSNLRSPSMEDVACYTAYSLSTEQLDPTMVSPLLVCEDFERATLAPTPEEAEAFSKIDQEPIIVADPVQYTKKDTTWLTALRLVRPLLLKEATIMARLRELKLWDGEESIGVPVSPRRPQSTASMENRPRIPISMLLNDDTLPDSSGYFATQVDPVRWVERLTKGERVFGLVD

SEQ ID NO: 364 - protein, 801 aa, synthetic construct
  source 1..801: note = MG151-35 reverse transcriptase
SKLDVGKTDLIECDMKVDTSHPSYKSQKQRYMPRDKLKVAQEAADVLLKSGVIQLSETPELKSNLCLVPRIEAGHIRDSTIAAKINQKNKQQGNTWRVCVDLRNLNACSIGNTSPSLSTLDSILAALRGKMVTNLDFSNGFFHIPLSENSKPLTAFYLGDKIYEFCRLSQGYIYSPTVFIKFMQRIFCKEEFELSKRILSPAELEIIKNMTSFEAISVNFMDDLWIHSPMELGFDGHLICIKLVFSALSRAKVKLGPKKCVFYTHDFKVLGIAVNSKESTMFIDEKKANAILMWGRPSSLAELNSRIFSLNYWEKFLPKLREIIAPWYLVLRSQQFYWDEHCEDAFNQLKMLILADIRLNIPNEDDQLILATDASKLSSSQVLFIRNKDGTLKICGCNSRIFSYQDSRRDANFKESISLATGFKVFGPYLSLSSKAPIILCDAKNLMYISRLKERSILANNLIMYLTDMAKLYEFQVYSIPGPINFLADLLSRAFSKSRFVNKNKYNLSKETAEILPNLNPLFSIDNETLVKYFQSEMLPEKDDKGNKHKNLPKQLEPLLTMYMNRTPEERYIDTILILKQITRRIKNSKLNSTIIVEGTKELKLSEDDIKHLLSHDTTRGSESKKATYVKPLLERIIDEYFGTDLDPKYKIRIRDALLDNFLKMRRIDSSSSYLNNMYEDLSIIVVEEINNNILYSYEHLNDIFINQNYKTYTEDIIEDDGTIIKIVPRFDENSLLEENSSYNIQLTEDLEDKNTSDNVSYSLNLKLLHSKVEKLDQIDILKNEKIKVYQNGKKLNIYFT

SEQ ID NO: 365 - protein, 759 aa, synthetic construct
  source 1..759: note = MG151-36 reverse transcriptase
GAPSSTLDGPKFDIEFAPNAQPVKHTLPKYSEDQKRKEAYHVDKAEKLGHLRTPNETQKSEWATRTHCVWKKDDDMGRWICDFRDVNKATVKKPIVIGDSHDLVRQLAQKKWKTMFDAWAGFNQVAATERAKKAMQITTSVGLRQWEVMPFGVTNGPSCFQGIMIDHFTPIAADLKEFEAAINFFFDDGALGSGSWDMPDSESDADNGFDQHLKALDVVFKRAAVINLRFKLSKCHFLQFAVPVLGEIAGLGKVSPDPSKTDAIRNWPRPSRAEDVERFLCTLSFFRTHVSPKFSEIAKPLRDCMSELHEKRAQGKYRKVVRGGDPHVTNRHGNASEHWPAFWNNECESAFNTLRDLAAKAVDLSVPDLEGAHNGTNPFILFPDACKFGVGSGLFQACPVNPELRKSHYFTLGCPTWSTKAAITLRFNELKRTYTKATNNSNKLSEIQVAFDVLGDTEKRAAYDLSLGLEKTHLSRIDLQPLGFVLVNRLTGAQVNWTTWDRELYAIVAPIDHFSSLVSGATCVLATDHLNNTVMNVDLKQPDKILRMLLKIHTKINPVWQFQPGRGQLGDGFSRNPPDRDKVRDAEADTARLPSTLGEAFELITKAQYRGGIEVDDCEELTQQFATMCERSADYIPFNSTDYLLSLPSFGPKTVEQHINMKQSVANRTSSVGVVNKSDFVLNCPSKTSLPYAMYKLPALLLPNANMTEDEVDDLNSTLTVRGPESELSVAVPFGTGGFRYTVTDAMGTGRWLEPYVPA

SEQ ID NO: 366 - protein, 452 aa, synthetic construct
  source 1..452: note = MG151-37 reverse transcriptase
NPGKCNCFEYRFQLQGRVPESRNSRPIPFALSKEVQEQVEEMLADHIIEESYSSNVNPLTLIQRDGKRVRICFDAREANKFMTPDRAKVPPVQMLLQRFHGASCISTLDWSSAFLQIPLEKTSNKWTAFQFQNKVYSTNLHAYHMGSEILSALLLGHFSQYWGADTSEYALHYVDDLVVFSKTFEEHLEHLDSVFRKFTTSGVTMNIGKCNFCKPEIKFMQFLQTRNQILITHNFQELNRPDPQKIEAILNYPAPHNHKQLKKFLGMCNFHQRFIVNYAEHVAPLLQLLCKNTPRKWSAEMQEAFVTLRDKFATTIHLVHPDGNLPYIINTDASAKAIGAVLLQQDREGNMNIVSTASRVLTPTEQSYTTCEQELLGIIFALEKFRIYIFGHKIIFYRDNKSLTFLNRCAITLNRVARGMVNLQQYNIRVTACKGGPQPFGRHNQPKSSRSK

SEQ ID NO: 367 - protein, 516 aa, synthetic construct
  source 1..516: note = MG151-38 reverse transcriptase
LQPYLDDNVKIDPSSFCPHPFMIVDLKVAPGATVYQRSYRPFSQSQQGEVDKQVEQWEADGVIVPAPPGTKHMNKLTLAARHDLDGNIIKHRVCLDPRHLNSLLEDTDNFLLPLITDVLEKSGGHKFYSTLDLKQAFHRLPLSKKSQPYTAFMHKNKQFMFARAPFGLKPMTSIFQRGMSLILGDLAFVAVYVDDIVIFSNSKEEHALHVQEVISRLTKANLIINPEKCHFFCTEVILLGFIIDRNGRRIMPQKIANIKSWAPPTNAKMVQRYLGMFNYFREYIPLYGTLSAPLDELRFRRGHFVLSDLQLECFNQIKYLISQAPVLHFPDFSKPFYVATDASNLGLGAVLYQLPNGPEDESVVHYISFMARSLKKHERNYPAYKKELLGIVFALKKFHYYLWGRPFTLYTDHKPLTFIKTQADLPATIANWTETILSYDFKCVYRPGLLNIIPDALSRAFPSELWPSPDPDPLVHRDKRRKAAVSTRSSFRAFSAPSSPELVVKAKDLANQMLEL

SEQ ID NO: 368 - protein, 704 aa, synthetic construct
  source 1..704: note = MG151-39 reverse transcriptase
EINPNISPEQRTNLLQTLYMSAYTCKFEEFDIELKHDNPCYRRQWKQPLALAHQKIIDFHIREMLQSGIIEPSRSQKYNSPLFIVPKKNNKNKNTLNKGHRGRNQNQEIDTSPDAWRVVIDFRAVNQIVKPYTVASKGVKQVIEEITTLPDNNEQLPKYFSVFDLFHGFYNLVLKASSRDITTFTSTDGLRYRFKKVPQGLNISPALFVSVMHRLYAQLRNQGRLNYYMDDLILYDHSFDSHLENINNFLQILIHNGLKCNPAKTQFAEQKVRFCNFDISSEGISIPDTSLKVLHNLVESVRDKRSLLRALGLINWFRLFIPNVSKRTQHLRNLTKKNVPFEFTQVHRSELEDVISVIKNATCLACYDPHKPIFIMVDSSMAGTGFIIAQDTATRQFGIDKTPEQRIQELRRSTFKLRPIFLALVQQLNPCENGVRIVMRKWSAHSLELHGLMRALQSCEHLILPGQDIFVLTDNSSIVHFNTLHFNNSRQKRLLAYLQYFRLQIFYTKGKKLERPDCLSRVFETMSENEISQFHPPEIEDFIFSINPKVYTEKTDECVSMQSFPETLTSGVINLLTNMNETTKNKLERSYPLSLKALFLNNNENICFDSVSDSLYTQMHEDNGPSEQSARPTNENSVSSTLNVNATNFVPKQSTYEESASSHVSVDNIINATRVLRRSSSTTDVNISNSECTPTGENISPLIE

SEQ ID NO: 369 - protein, 646 aa, synthetic construct
  source 1..646: note = MG151-40 reverse transcriptase
HPGDIGRVNDPRFLMDIILKDDNHPLPLELPYQTASNKKLACSRIVEGWLQSGIVERSFTRTHASRLTVASKHLNKTDFKKIVDRLQAEHGLDFSNLDQFEFSRIPPNLLTAYELSKGYRVCLDARALNNLTQDEIICSPNPDLMISELMFLPSYQLKLSANSDLMSNVPESLKKYFDTDIEDDDCMYYSSLDIRSAHTSLVLTERASHYLNVILPDYSLIRFLQSPFGLKTINSRWNSFITTVLHDLIQRKLVVIYADDLLILAKGRKLHRLVLIEVFRILKKYNVKLSINKCNCFVDKFQFLGFNFDSNGITLTDERISGILNLEQPCNLKGLQRILGSMVYIGRFISDLSTHLLPLTHLLNKNVPFILGKMTLKFIDADQELSLYCDSSKKAGGSVLFQEDKITKQPNPVCFFSRKYNTQQTQHYSSLELELINIIDSLSRLKAFINLSSKPIKLFTDAKAIIFLLKAVKEGPNPKLTRLASKLAEYQLNFQIEYCKPDGNQKFLIADFLSRSREKEDFENFPPPPPMQSFRKITKEHINHSLPKGANFTLTDLTEQVDKHPEWFVQFPTPSSPFLPALPASNGNLAFQGDNAQENSIFLPVLDPDSDSPKILHRLLFLRRDLSAAEIIKKQSEDKFICSFVD

SEQ ID NO: 370 - protein, 538 aa, synthetic construct
  source 1..538: note = MG151-41 reverse transcriptase
SPDEIGCVQPSMVAPMVIFTVPHVPWDLKPIPVPRALLPKLVTLLKEKMQMGILEPSMAPYSNRWFTVPKKSGALRFIQDMQPANRVTIRNKGSGPIVDEVAEAFAGQAIYSIGDLYSGYDQFQLAIESRDLTTMKTPLGLVRMCTLPQGATNSVAHMQSAMNQILRDFVPEKTIPFVDDIPIKGCPERVKDSTMDADGCRVFVKNHITDVERILKRLEEVDLTLSIDKSKFGFDEIVVVGHLCGRYGRKPNPEKVDAIARMKACRSTTEVRRFLGACVFYHIWIPHFAHMAEPLYKLLRKGTKFAWKEDQSLAMDGLKEILQSPPILQQVDYDCGTPVVFTVDTSPIAIGWAIGQDDAEGKRFAIRFGARILTERPRAYPQVKRELLGALTALKADRNYLIGANVVLETDCLPLLGMIANCSIPDIAMLRWIAYIKSLNPILIHITGKKNSVADMLSRARYVCEEEMETQEVDEDNEDDDYGYVLATSQANSDGEALPFRAELYEGRLRDIGLYLSTLKRQEGWMDKTFKDIRHQSY

SEQ ID NO: 371 - protein, 714 aa, synthetic construct
  source 1..714: note = MG151-42 reverse transcriptase
DNPGRVVTTAVPFTAVLKPEHDPKVTPGVKPFHEYRRPPPALATVMQQWVLDSVKAGILKPHRSAYSSPLFMILKPPKADANGWIDPDQPKKYRTLCDLRACNRALVEEKFPQPSCQEIFEKISPDMKIYSGLDLCSAFYQVPTAPDVWDYLSVVTPPTEIKERIDIQLTNGDRTVVEPGVYHSFTHLRLPMGMHASPSHFSNTLYDTLRRHVPEYFNTNILQFADDLCIMTETYQEHWDVLSALFRGLDSDGWTLARSKAFMFQRSLRFLGLIVSSAGVDEDGTTGVAKLYGDKQKVETILNLKRPADLTELRSFLGACNFFRIFVPAFSLIASPLVKMTKQGVNIKEQWGEEEDRAFRDLKLAIATAGAVTPYCPQKEVIIQVDAYRLGVGAVLCQIYGAKARLVAFFSKAYREPAWQWKGPGTDQLEPSSDNNKRPKQKPGSSKPPQALELRGIVEAVLHWRNYCIGNTVGIKILSDHGSLRYIESQRSKGLCSDQTERWCNFLSSVQAQVSWRAGAGLAVADYLSRHGHDERSWDELNWTSKYDGTDEGMKPANEVLKEASYDAYDFGASCDAAIDRKLYGGGDELMAGIPITDVLPLSCPDSERKFKGADLKMFVRLSQMCVDQTGLCGLDSRRFEVEPLNCGLSATDTAEGATLRPVDGRELALATVPVFKDLWEPEKLSVLRDTMEYDGKERLIQRARLEGWTDAQA

SEQ ID NO: 372 - protein, 815 aa, synthetic construct
  source 1..815: note = MG151-43 reverse transcriptase
NIPPEWTGGEPYADLKLERDSPPIQHQERRIPPLALPVVMAQIRAWLEAGIVEPSTSPHSSPLLIVAKKALAPPRDPKTGLPVAGWNPKPRWRVCVDYKTVNSRLQAVNMSNAPRLEVCLHQVASCNGYTFAAREHETRTGQSDKTKRWLATTADLCQGFHQLRIAPECRPLTAFTIPGVHTQEGHLQFVCCPFGLSTLPTHFHQVVGQAIGNLHYGDLPLSKEAPGSGQAPQQHQPDETGLEVEVDPEESWRILNQDPDNRPCASHYIDDVYISSYTTFEAHLASVRKVFKRLEAVGFGARVDKVEFAQTELQMLGWKVSEGRITTDTSKVHKIINEIGGNDDVLRDKKDVMSALGALNFYRSMIPNAGGISAPSTSLVVHRAALRALKTALLSDTFLAVPQENKEFYLVTDASVHSGAAVLAQVQPNGAEHPVSYAGTSFPETARRWSPSERECFTLLWGADYFKNWIRCGRTVLCSDHQPLIALARASTSNNSKLARWSARLAQYSNAVVSYRAGVCLGLSDTLSRLIYPAKVDTPDTRESLQATHRGFAPLENVDSIQGKGLRKFGLPLQRLSMLRPPTGQKWEDATRAYESARKQRDPPTTQPVMHEPDVLGEAVRQEKDQFSKHHDWFQPGAISADQAVRIMRYAMGTGEMAVLSEEELGSGDYYLSKWLDTTPLEKMMRGEGCYKTVADSDSDEQTTGIDDVDDAMSRKTVGDLFEEATGRRPDEEEVVYVCPLPETKRTHLWVAGKKPLDTNWEQLNMTTNMDVDTDYDSDENDDPLEALQQPDLEAWIQSQRFEDRDGREMRCNLT

SEQ ID NO: 373 - protein, 205 aa, synthetic construct
  source 1..205: note = MG151-44 reverse transcriptase
GLGKIKGVQASLHVNPEAQPRFYKPRPVPYALRKKVGKELDRLEEEGVILKVQHSEWAAPIVPVLKPNGTVRICGDYKLTANTATQTEVYPLPRIEDLFASLAGGKVFSKLDLSNAYLQLPLAEASQPLATVNTHKGLYHYLRLLFGISSAPAIFQRTMETLLQGLPHVCVYLDDIVITGHSQHLTWEWPQRPWMRVHADYAGPF

SEQ ID NO: 374 - protein, 501 aa, synthetic construct
  source 1..501: note = MG151-45 reverse transcriptase
EDPLAWWDKNEIQASLKLQKGKENEFVRYKPILMNQSDRKDMQMILKEHMDLKLISPGVSPYSSPGFLVRNHGEIKRGKPRLVINYQGINKILEFDGYYIPSREHLINCVQNAKVFSKFDCKSGFYQIKMEEESKKYTAFSTPQGHYIWNVLPMGLSNAPQIFQRKMDNLFKDYFSFMYVYVDDVLIASKTVKDHLRHLEIFSDVCFKNGLVLSEKKAVILTRKIEFLGIEIDESGIILQTHLVEKVRNFPDNLKTVKQLQSFMGLVNFAGMFINNLASYRKVFSPLLKKDADFKWIEEHKGTVQQLKKLCQNLPKLAIPNDEDGLVLYTDASDHWWAAVLTKVEPKGEVPCRYCSGLFADNHSARLFLLAKKFILKIDNTSVKAFLKNKIESKPEKARLLRWQAECQYYDFDVMVIKSHENILADFLTRDGATMEPHEANTILTRWRHQRESLEELNRSINSLAINAKAAGHVQEIDIKKVEAAMKATWLCNTSLWDSLI

SEQ ID NO: 375 - protein, 544 aa, synthetic construct
  source 1..544: note = MG151-46 reverse transcriptase
KYPQVVSLHGLDAGNLSLTLGYTQLRLREGEILPRAKRIFHVSPSDARHLDDIINLLIKFGFVMRSPPSPTGHHLYGMSAYLVPRAKPGCLGRLIVDFSPVNQLIESPSAVIPEINNTLQFLQGKVMYTSLDLRQAYMAMRIDEESQPLTTFLTPSGSYLFKSLPTGAAGSPALFAEASNRMLNFEPVLDQQGKPIFESPNVVKQDPSPLGHTISYFDDILVTSTSKATYEETLKEHFANLEETVKRLSFHGAKISVTKCDFSKIKILFLGWFVSHNFVVADPRRVQKVKDFAFPTNKKAVRAFLGLVNSLRKVVAMNVIEQVGILTPLTSSKTEFKFEQKHVKAFESIKELLTKEPLFCNLIDENAEKYLWCDAATGSGVLAGVLAQRIVGNKDDKIVPVHLDLENEVHQIIYDGSLPYEPCTLYTSLPIILPKPSLRKTIPPSIAKEHPLCGFTLENQIDSFFWSTLSVLALYSGGLTETVESLREKSVKYLKSSILNAQLKDFIFDMNWNNYNDFLTAYKAGKVGLDENLYLAKALAIYLQ

SEQ ID NO: 376 - protein, 790 aa, synthetic construct
  source 1..790: note = MG151-47 reverse transcriptase
KYPQIVSRHSLDRGHLSKTLGYFNLRLKENIVLPKNKKIIYESSADASMLRDVLDYLCKLKVISKASLTGDDIPNFSSPCFLVKRSSKDSAARLVVSYKLLNECISQDPITISNFDMILNRLHSAHCYSSIDLKSAFQSIELTPESKKLTLFSCMWGSYIFNTLATGMSVSPNALARFCDVMIHHIPSRDKNGKIQLNEKGLPIMINDRIPNVEIFYDDIIIFSKAGRTYEETIKIHFDLVEKVVSRLAFHRAKLEVAKSQLCKFKISFLGWLISNNYLMVDPRRVEKLNEKTFPYSAKGMKSFLGEVNWLRNTLNFQVLRNIHYLTPLTSTKLGKYNPNNIHREKFEELKKQLTQSCLFSKICLPGVPKILFTDAASEKYSQYSCVLAQIVPAKFSKNFVPSYIYLDDPTHRIIFDLKLPVKPVPLKKDNQTIKDYLINLESNYPPEYEYLDDDTLGYQEHFKISLSVCLKLMLELQNCVTKFESICFDLQKHIREHIMYNHILDTEHKGNKLSMKLYLEDIKKGVLKIDTGLHIFSALSNVLHRPVTLINATNKFNGKKLIRFNNDKNKPPFFFLLYEKNSNLIVRPTILNKHSEYNIGKHKGSFEIILYHSKVIPEEMRKTNIMQLELYAILGSLQATRKMVNSDELLLACDNKCLYYLYNQDVKDSHTKINNWGVKIEHDYPNLGLVFIKSENNPADFLSRVFQVSKPEIAHIKLPYIVKDSLNDYMPNQTTMTVKDWRVWVENNPQFIEVDKTKLTERQLESINKRDKNIAKGKEKGKEIKSNSF

SEQ ID NO: 377 - protein, 508 aa, synthetic construct
  source 1..508: note = MG151-48 reverse transcriptase
ELPDEPPPDRPIKQHIYLREGARPISSKPYRCPAPLLKRMNEHIQQLIAKGYVSPAPDSPWSSPIFFARHPRTGKLRFCCDFSEINKLLKPQHSVLPSVDDIHAQLKGAKYITTMDCLSGFHQMQIDEASRDYTSFDTAFGRLRWNYVCFGLKTSPADFTRLMQFVLGDALYNFALLYIDDITVFSQTFDQHIKHLRIVLDRLQKHTIYLRGSKCHFAGREVKLLGHLISGESVRPNPEIMDSIASWPTPTSPSELKSFLGLARFYARFTHHLSHTCEPLHHLTHKEFSRKNFPWGPSHDKAFGALKEALTSAPAVALPDPSLPFSIVTDASLFARAAVLLQRQDGVNRVIAYHSKGLSPSERNYSPGKRETLAFVKGVENFQDYLRIGHFEAWSDNIETVALATNPHLNSMEMKWRDFLAQFDYTHHHLPGLKNIADYPSRRPDYSFMEESVSAETSTSAHVTITPSPLPTDILSAVRDAYKDDKTATAIIASLETLGSASSFHRRH

SEQ ID NO: 378 - protein, 324 aa, synthetic construct
  source 1..324: note = MG151-49 reverse transcriptase
GHTDILKMKIDTGQHLPIKLKAYRAILHKREVIEKAVDEMLSANSIRKSISPWSFPVVIVDKKDGSKWFCVDFRKFNQITKANYYPLPLIDDILALLGNAKYYSSLDIKSGYWQIAMEDSDKEKTAFVCQKCLSEFNVLPFAVCNAPSIFSEMMGIVLEGLDTFAVAYLDDILIYSKTLGEHIKHIQVFDRLRQHNLKLKLKNCNFLQTETTCKIQRFNFGHMQNTKIQLWALGIAEYDCNIEYIPGKENMCADLLSRPQPRPEEMNKPHTDDNNLEPDINNNAFEISTINSNKFNSKLCLNLRNLSKKESKTKMKPHLQETDI

SEQ ID NO: 379 - protein, 738 aa, synthetic construct
  source 1..738: note = MG151-50 reverse transcriptase
GLSYNAGALPAVPFISARVILDPAKGPHVPYRAAVRVLNPIQRAGLEAKIRQWLSQRIVEESASQWSWPLISVAKKRRPGQLTPEYRFCADLRVLNNKVLADSLFTGSVPANLALLERHCIYSALDLYNAFESCELEPNSRDFFSFSSPSGQQFRYRRLPQGFVNSPAIMSRLTAELLANLPTSSREAKLSRLAPETQSTHGAQRVPGQQEAGNSIPVNTHDNTLHNTPQNIPQTPPRIKPMKHTPPINNSGTLGYVDDVLCYSMTLKDHINLLHILFHRIREANCRLKTSKCFLARKEVEYLGYMVGENGWGMCPAYRQSVVSWPIPTNKKELSSFLGRANYYRAFLQHYSDLTADLNKAKTREQTPWVLSPEEIRQFHKLQEAFNNSEALSFPNYDDLKLNPLIMDLDFSKKGLSASISQNQECSDKIFRERLLCNVSRKAPSELSVSSSHRGEISACILGLNSFRHLLLLAPFKIRSDSISVRYLSTLKDQRSPFPRYFQLLADFTFTAEHRPGRTNIPDDSISRRDDLPEMNRDELDFHSSQSFVDQLTLAQLEELEDIAIEFADPYPALWSSQTCQATDMWPSSPQDLVKTDIDTPPTNHQDHICAEIHPKLQYLNKIQEQFKGVVGEVTDKYLAKVWSSGSAGPPVVPTEPPGVPAGPPMVPVGPPAVPAGLPKGQAGPPSAPAVHPPLAPDRPTARQRGSTAQPDSSARQPDSSGQDRTPAPGRSGTAPRH

SEQ ID NO: 380 - protein, 724 aa, synthetic construct
  source 1..724: note = MG151-51 reverse transcriptase
GLSYNAGALPAVPFISARVILDPAKGPHTPYRAAVRVLNPIQRAGLQAKIKQWLSQNIVEESASQWSWPLISVAKKRRPGQLTPEYRFCADLRVLNNKVLADSLFTGSVPANLALLERHCIYSALDLYNAFESCELEPNSRDFFSFSSPSGQQFRYRRLPQGFVNSPAIMSRLTAELLANLPTSSREAKLGQSTPETLSSSEPTHGAQRGTGQQGAGNSIPVNTPDNTPHNTPQTPPRIKPMKNTPPLNNSGTLGYVDDVLCYSMTLKDHINLLHILFHRIKEANCRLKTSKCFIARKEVQYLGYMVGENGWGMCPEYRQSVVSWPLPTTKKELSSFLGRANYYRQFLQHYSDLTADLNKAKTREQTPWALSPDEIVQFHKLQEAFNNSEALSFPNYDDLKLNPLIMDLDFSKKGLSASISQNQECSDKIFRERLLCNVSRKAPSELSVSSSHRGEISACVLGLNSFRHLLLLAPFKIRSDSISVRYLSTLKDQRSPFPRYFQLLADFTFTAEHRPGKTNIPDDSISRRDDLPEMNRDELDFHSSRSFVDQLTLAQLEELEDIAIEFADPYPALWSSQTCQSTDVWPSSPQDLVKTDIDTAPTNHQEHICAEVHPKLQYLNKIQEQFKGVVGGITEDKYLEKVWSSGPAGPPVVPVGPPAVPAGLPKVQAGPPLAPAVPPPLASGRPTARQPGTTAQPDSSARQPGSSGQDRTRAPGTQAAPSR

SEQ ID NO: 381 - protein, 602 aa, synthetic construct
  source 1..602: note = MG151-52 reverse transcriptase
DLPSRPNATWPAGEEYARLRFKPGREPKSVRQFRLPEGVRPALRRTLEDMLRHGLIEPHDGTGINSPVLFAPKPGTTELRFCYDARNLNAAIADYHYPAPTTEEMLDKIARLKQEAVASGTSGQLWLSKADARHGFFQVSVHPDDRKYLAFSVPVLDGSYRYTVLPMGLKSSSFEFQRRMDGIIAPLANRSTFDYEITGQEHGRPVVKRGSAIGTACIYVDDLLVASFGSREEHEALLYKTFELFSKHNIVFKISKTVLFQHELEFLGHVITQTGVKQQPGKVDAIRNWPPLRSQDNVRSFLGLASYYRKFVDGFARISQPLSDLLRGPPSTFPAPLPPAAEQAFSALKSALTTAPVLMFYDASRETQVWTDASDYAIGGVLLQRDDKGEWRPVSYYSRRLLDSESKYSTYARELLGIRDCLLAFRWYLVGIRFVVKTDHSSLTWFLQQKELSGLQARWLSVFESFQLREIEYVPGEKNVLADALSRNPDPHGETFEHMVPPSDMPVPEEELHLKQASAVPDVPDVAAVKVPIQLQLWSPSDEPTVLGAVDDAAAWRAEGYNVSGRTINTASSYREAYPLCPDFKAIWAVRKKPDKMAELYP

SEQ ID NO: 382 - protein, 592 aa, synthetic construct
  source 1..592: note = MG151-53 reverse transcriptase
DLPSRPSATWPGEEYARLKFKDGVLPQSVRQFRLPEGVRAALQQTIEDMLRHGLIEPHDGTGVSSPVLFAPKPGSTELRFCFDCRALNKAIADVHYPAPTTEELLDKVARLKQEAAAAGATGQLWYSKADARHGFFQVAVHPEDRKYLAFSVPVLDGSYRYTVLPMGLKSSSFEFQRRMDLILAPLANKTTFEYEVHRREMCQVDGADVERVVTRRGKAIGTACVYVDDLLCVSFGSREEHESLVHQTFARFAAHNVVFKISKTVLFRSEIDFLGHTLTQSGVRQQAGKVDAILNWPSPSSQADVRSFLGLASYYRKFVDGFARIAQPLSDLLRGDASSFPAELPPPAAAAFADLKRALTTAPVLVYYDATRDTQLWTDASAYAIGGVLLQRDSAGDWRPVSYYSRRLLDSESKYSTYARELLGVRDCLLAFRYYLVGTPVVVKTDHCSLRWFLQQKELSGLQARWLSVFESFNIREIEYIPGEKNVVADALSRHPDPDGERFEHLIPPANMPGPTHCHAFEDAALDESPTVSRQPASTVDGAADWQREGYNVSGRMPASASTYDSLYAACPDFAAPWSSRHHPHAMTETYP

SEQ ID NO: 383 - protein, 640 aa, synthetic construct
  source 1..640: note = MG151-54 reverse transcriptase
SLPARPQARWPDGTEYARLRLQPGAEPRSRKQYRIPDALRPQLQKTIEELAAHGLIEVQSGSPYNSPILFAPKPNSTEMRFCFDSRELNKVLLDHPYPAPTTEELFDRVARLQHDAKLAGVEAPLWFSKTDARHGYWQIEVHPDDRPLLAFTVPVLDCSYQWCVMPMGTKSSAAIFQRAMDQVLAPFSNTNRFKVRQVDTPGANDGTVEVTPAAMGSVREIRAPEHRAGPVGWAFGTAFAYVDDVLICSMGSREEHVALVDAVMASFARYEFTFKLSKTDLYKSEMDFLGHRLTQHGLTRQAAKVEAIERWAVPTTQTELRSFISVIGYYRRFVDGFARIAQPLTDLLREGQFEYPLPAAAQAAFVELRALLSRAPILKYFDPQDETELWTDASGTAIGGGVLQRDARGNLRPVAYYSRRLSPSEEKYSTYQRELLAIRDCLLAFRFYLVGLPFVCKTDHCSLQWLTEQAEMSPLQSRWYTVFLEYDIKEIQYVKGEKNALADALSRHPDPTSQPLDYLVPPFNMDIASFHGLGLSPDTESLAGHHALPTPRQLFDAGAVVQPVAPLDCPIWQAWEERPGSSKPSSVSLTLDDWRAAGYNVSTIQPVFLTNFRDAYPACPEFGPVWASLSRGAAGHDIYP

SEQ ID NO: 384 - protein, 638 aa, synthetic construct
  source 1..638: note = MG151-55 reverse transcriptase
SLPAKPQARWPDGTEYARLRLQPGVEPRSRKQYRIPDALRPQLQKTIEELARHGLIEVQTGSPYNSPILFAPKPNSTEMRFCFDSRELNKALLDHPYPSPTSEELFDRVARLQHDAKLAGVDAPLWFSKTDARHGYWQIEVHPEDRPYLAFTVPVLDCSYQWCVMPMGTKSSAAIFQRAMDQVLAPFSNTNRFRVRHVQTQASDGPGEGELEVTPASMGSVRTDAPGGAQREERTGWAFGTAFAYVDDVLVCSMGTREEHVALVDSVMASFAKFDFTFKLSKTELYKSELDFLGHRLTQQGLTRQEAKVDAIRKWAAPTTQSELRSFISVIGYYRRFVEGFARIAQPLTDMLREGQFVSPLPPAAQKAFVELRERLSQAPILKFFDPRDETELWTDASATAIGGAVMQRDARGNLRPVAYYSRRLSPSEEKYSTYQRELLGIRDCLLAFRFYLVGLPFVCKTDHCSLQWLTEQSEMSPLQSRWYTVFLEYQIKEIQYVKGEKNALADALSRHPDPSTQPLDHLVPPFNMDTTRFNGLEARSDVELPSPCELFPSGALVQPAAPPDCPIFQTWEQRPWSVAPSSTSSCTLADWQARGYNVSIVTPSFLASFGPAYLECTEFGPVWQALSQDAAGNDIYP

SEQ ID NO: 385 - protein, 638 aa, synthetic construct
  source 1..638: note = MG151-56 reverse transcriptase
SLPAKPQARWPDGTEYARLRLQPGVEPRSRKQYRIPDALRPQLQKTIEELARHGLIEVQTGSPYNSPILFAPKPNSTEMRFCFDSRELNKALLDHPYPSPTSEELFDRVARLQHDAKLAGVDAPLWFSKTDARHGYWQIEVHPEDRPYLAFTVPVLDCSYQWCVMPMGTKSSAAIFQRAMDQVLAPFSNTNRFRVRHVQAQASGEPGAGELEVTPASMGSVRTDAAGGAQREERTGWAFGTAFAYVDDVLVCSMGTREEHVALVDAVMASFAKFDFTFKLSKTELYKSELDFLGHRLTQQGLTRQEAKVDAIRKWAAPTTQSELRSFISVIGYYRRFVEGFARIAQPLTDMLREGQFVSPLPPAAQKAFVELRERLSQAPILKFFDPRDETELWTDASATAIGGAVMQRDARGNLRPVAYYSRRLSPSEEKYSTYQRELLGIRDCLLAFRFYLVGLPFVCKTDHCSLQWLTEQSEMSPLQSRWYTVFLEYQIKEIQYVKGEKNALADALSRHPDPSTQPLDHLVPPFNMDTTRFNGLDARSDVELPSPCELFPSGALVQPAAPPDCPIFQTWEQRPWSVAPSSTSSCTLADWQARGYNVSIVTPSFLASFGPAYLECTEFGPVWRALSQGAAGNDMYP

SEQ ID NO: 386 - protein, 564 aa, synthetic construct
  source 1..564: note = MG151-57 reverse transcriptase
FREMPHKNNITRPDSEKMRIKFKPGMEKEIPAPRRAKCPKHLLPIMKKALEELLDNGFIKPSTSPFSAPVLMIVKPHQEGVAAADLEYRVVVDLRAINNLTIPLHHRIPDITGIWHSLAGAKYLSVLDLTKGFYQESLREDDENEDGSGGTSSSDKTAFCCEYGSFQFVGAVMGARNTPAFFQGKVELALRRAGLIDVGILTKDTTGKHIITKGVPCCTNFVDDLIVYSETREQHIKDLRRVFKCLSENQYYVNMKKCHFGCKYVLFCGGVVGNGVLAMDPVKVKAIDDWVQPMNITELRSFLGMSNYLKMWYSNYSDHAGVLTNLLKKGKCVQRDWCPECTAAFQALKMGFKSYPILRLPDFDKQFYLLTDSCATAIGGCVAQMYEYEGEGGTNKMVLLPVAYHSRKMTKHEINYSVREQECLAIHDCFKKFEYLLLGSKFEVVCKTDHSSLKQVQEGGTLQTSKRLARWAEYLGGFAYLVTWIPGITNLIGDGISRSLGSDTGTGYRGGGYMPSELAPINITTSYQGDARMDNLVYSGSKDFGAVYKLLADPAVDLDQHPEI

SEQ ID NO: 387 - protein, 708 aa, synthetic construct
  source 1..708: note = MG151-58 reverse transcriptase
QTPISVHTPLDGDPLLHIHRRADAPPLKRAFIKTAVPLLPHLREFIESMTAARFIRPSVSPFSAPVLVIPKPLNPDGSSRGFRLVTDYRALNAQVDAVQHHIPDVHAMYEKLRHAKYVSTLDLKNGYWNAGLTEESKHLTAFSTEFGTYEYNVVPQGLVCSAAHFQKWVETKLRRHGILFEHVSVNPTLQAGLNTSALFDDKNRYIGTQPIGIAKMKGESGFVAVYIDDLIVFSGSEEEHARHLIKVMEVCSNEKLYLNTSKSHLFCKYTRYLGAICGNGELFMDPKKVEAIMKMPSPTESQTQIREFLGSCSFYRRWIDSYARLTTPLTELLKDTAKGKTRELWDKDPIKYETVIKQLKDALCSYPVLRQPDFDLPFVLYTDASDYAIGGVLCQLRENKMCAIHYVSRSLQGPEKNYSVQEKEALGIIFCVKKFRKMILGSGFKIRCLTDHRSLECLTNSKEVAGRMARWAMIMSEYNYRVEYIKGCTNTAADSLSRLIKIPEGRWTPLAPDDSDSDSEHPFLLLWPETLLLLSTYQQYWAQNDDVGNLSEHDLLMAFTEDHQIWLKKEEKFNHPLCDIDAMEQVLFSRSTVYTGDITVMTVTKELYCKCSDFADLHKYLSDIQQSKIVQSPNDYDTNPVAPPSKRQLALPMVTRSSDTEQDPPQWGLNGPCTDTRQPRGNDNRQAPAVPDVTPKRVPRSVIKAKRK

SEQ ID NO: 388 - protein, 657 aa, synthetic construct
  source 1..657: note = MG151-59 reverse transcriptase
FKDGKHGQFDCGKPLEFFNPHPDDVPAKIQLRPDAKVPPICRYRCPNNLLPEFRKYIQEMLNKGWISPGESEYSAPVLIIKKPGTYDDGSSKGFRFVSDFRAINKIVAPVTHYLPEISEMWEKLRSAKFMSVCDVRHGYWNVGLDDDAKRFLAISTPFGQTYVYNVLPQGFINSSAIFQRFLERKLRKHKILYEPKISTIRGEDSTECAGGDKTDGIDAITSDLSGVKIDTKEPNNFENEYQGFCSCYQDDIILWSASAEQHKSHILKLMKVLSEEHIPLNIQKSHFFCKFTRYLGAICGDGKICMDPEKTASVDTMVVEKNETSIRCFLGMCGFYRRWISQYARMAKPLSDLLCKDVNISKQWDERADKAVQNMKNALTTYPVLRQPDFKKPWIVCSDASDYACGGCVSQEHDGKLCPVAYCSRAFKGPELKYTVQEKECLGVIYCLKKFTQYITYCPAFQIRLMTDHYSLQFLHNQKLIATGRMARWAMELAEHNAKIYYVKGRTNYTSDCLSRLLDLSETEFDTTQNLMVLYPRFQLMIQKLLTHRPSVEGISSEIDEEKYLSFWIKKASEFDKKLDNFDISCKTNNTRSDGNAPHECVLFSTARVSINTKPLSITHEMYLKCPDFGLIYQCLHDKYKDTVSKENFKKVKHRLK

SEQ ID NO: 389 - protein, 888 aa, synthetic construct
  source 1..888: note = MG151-60 reverse transcriptase
LHKFNPTEFDMQNAMRINLKVGAEAPPPEFRKQGHHMLEIIAAQIKEMEDAGWVYRGKSVTACPIHMVRKGGTGPGEKPKWRITCDYRELNKVIQNHSYPLPEVNETIRAVREQACESHRQDLERGVANPDIPAGIDPKGHDPGVSFISVGDLAKAFYHMPVHPDDQYLTAFTVPGLGTWMYRGAPMGVKTTPSCWTEFLHKKLRRHGCLFEPGMYDPKDVIDAPETRMNDGGPRPHSYLQVYIDDVIIVTASQETHVRAWEHFIKVLEYERLSMTESKIEIGVKYLRYLGHIISHSEVFSDPKKVEAIMDLRTPRTKKECRCWLGCCNYYRPYIVNFGTIARPIIDLTTDRFGNDISAEWDSDPRYQKAFDTLKEKLCEYPILRLPDLSKPYVVCTDASNFGLGAALCQRVDGKLVVIEYASRSLVDAEQNYTATEKECLAMKWAAEKWRLYLLAAPVTFRIQPRMDKMEEVSLQAAETKASAQHRIPKGAVVMDTPNVTFQTDHSALTQLPRKRVISNSRLAGWVTSMSEFEYDVQYIPGDSRSLDTADCLSRLIRMDDEHDADKRSESARWQYANCWTEVYAKLFDRLKADDVSTIIASAPGCRDAEDTGLVNTVNATEGSKPEGGGECPDGWYPETDVPGWNNLGDIDYYTDVELQLPKYSGITEAAVQELSYGEGGGCGGEELCTAFENSFLSEFCQYGQGELTATQHTVRINNMRSSAPVCAIPILEGHDCGDCTVQPRGAEILCHQALQDEFERCHAHAYEHNTFSFAQCDGTPPEGHIYGIFAGMGEQIGDWFRTEENATLSGIAKCTGVSQHELVTFNQRHPTVQFPEPHAQPFNDKGQPRQYLRAVPFKADTWIQLTAEPAQGPEELLEGEQVRDSHA

SEQ ID NO: 390 - protein, 515 aa, synthetic construct
  source 1..515: note = MG151-61 reverse transcriptase
QHQFNPSRFDMEHAMRINLKKDCEPPPPEFRKQGHHMLEIIAAQIKEMEDAGWVYRGKSTTACPLHVVRKPTAPGEKQKWRITCDYRELNKVIQNHAYPLPEVTETIRALREQACESHRQDLENGVENPDIPAHVDKRGHDPGVSFISVGDLAKAFYHMPVHPDDRYLTAFNVPGLGTWIYRSAPMGIKTTPSCWTEFLHRKLRRHGVLFEPGMHDPDDILDVPETRMKDGGPRPHSYLQVYIDDVIIVTASQETHVRAWEHFIKVLEYERLSMTAPKIEIGVQYLRYLGHIVSHSEVFSDPKKVEAIMEMPEPRTKRDCRCWLGCCNYYRPYILNFGNIARPIIDLTTDKFGKNIAEEWDSDPKYKQAFDTLKQKLCSYPILRLPDLSKPYVVATDASDSGAGAALCQRIDGKLIVVEYASRAWTPAESRYTATEKECLAMKWAAERWRLYLLAAPVTFRIEPWRQHRTRTRVNLERTMSKQRFKADTYLKLCAEPETQPEDYEDGKLVRNSRQ

SEQ ID NO: 391 - protein, 477 aa, synthetic construct
  source 1..477: note = MG151-62 reverse transcriptase
FVHDPSKWDLENPMNIELREGEEPPPPEYRRMGPNMLAICAEQLKEFLKAGWIYRGAARTAAPVLMVRKPNADATADVKWRVTIDYRKLNNVIRKKAMDLPTCTGTIHTIREQACESYRQVIANKNGTRTSIHTDHSDRMTPSPDPGRSFLTVTDIVKAFHRVCVTPEAQELTAFCVPGLGVFKWNVAPMGLATSPAEYVEWFTKKMKRYGVLYRPGDHEPSEVLDIPELNITDGEPSPQQYCQVYIDDIILVACDIDEAVRQVKHMVRILELEKLYISLEKTVFATTWLRFLGYIIGHTDTFADPRKVEAIQGIMPCTKEHPWSKTATKSFAGMTVYYRMFVMDYAKLMRPIHRLVRDDVTPDSNVSAFWTRRLPKADPNYETEIENALGQRSPRVKEGNAYELTTQEGFEEVKRRLSQYILGRQPDPRKPFTIATDASQYAAAGALCQEHKGKMVPLEFFSKAFNKEAQRYTTCS

SEQ ID NO: 392 - protein, 802 aa, synthetic construct
  source 1..802: note = MG151-63 reverse transcriptase
FVHEPSKWDLENAMKIELEEGENVPPPEYRRMGPNMLAICAEQLKEFLKAGWIYKGAARTAAPVLMVKKPNADLKAEIKWRVCIDYRKINAVIRKRAMDLPDVPGTIHTIREQACESYRQVIANQNGSRTSIHTDLPQRAAKSKDPGKSYLTVTDIVKAFHRVCVAPESQDLTAFCVPGLGVFKWQVAPMGLATSPAEYVEWFTKKMKRYGVLYRPGDHDPRKVLDIPELNMTDGEPSPQQYCQVYIDDIILVACDIDEAVRQVKHLVQILKREKLFISLAKTVFATEWLRFLGYIIGHTATFADPKKVAVIKDILPCSKTNPWGKTAVKSFAGMTVYYRMFIMGYARYMRPLHNLVKDDIKPDSDISAHWTRRLNPTDPAYETHVENVFGQRRVRELETDTKSKKIHALTAQEGFEGTIKMLCLFIMGQQPDPNKAYIIATDASQYACAGALCQEHKGKIVPIEFFSKVFNKQAQRYTATERECLGLKHALENWSWYLLGSKFNVVLYSDHQALQALAKSKINNTRISNWQLAISPYRFTVQYKPGRSAIMAGPDCLSRLLQESWKHYRNNDNEWTTVDFYDEVPAFKQLFEKLESDDRDFLTPKVDTETVSVYQKGGGKKVSSEISAIFEIQQDRSAKEQQSFLDEGHERPQLVESLWDPVRKEDSPPGTPYDHAAERQNAYKYQQAIEYGVHTIALDPYGTTANDVMYMAEGLPLDFDDSTPDKGAIHGAQGRLKGDMYNASNNDMPVSIAKRFNINLKKLLHNNSMQHPGLKAKSKLKANTPIILQNRVIGERTMQGA

SEQ ID NO: 393 - protein, 797 aa, synthetic construct
  source 1..797: note = MG151-64 reverse transcriptase
FVHEPSKWDLENAMKIELLEGENVPPPEYRRMGPNMLAICAEQLKEFLKAGWIYKGAARTAAPVLMVKKPNADLKAEVKWRVCIDYRKINAVIRKRAMDLPDVPGTIHTIREQACESYRQVLANQDGSRKSIHTDTPKRAARLKDPGKSYLTVTDIVKAFHRVCVAPESQDLTAFCVPGLGVFKWQVAPMGLATSPAEYVEWFTKKMKRYGVLYRPGDHDPSQVLDIPELNMTDGCPSPQQYCQVYIDDIVLVACDIDEAVRQVKHLVQILKREKLFISLAKTVFATEWLRFLGYIIGHTATFADPKKVAVIKDILPCSKTNPWSKTAVKSFAGMTVYYRMFIMGYARYMRPLHNLVKDDVKPDSDISAHWTRRLEITDPAYETHVENVFGQRRPRELETDTKTQKIYALTAQEGFDGAIKNLCLFILGRQPDPNKPYIIATDASQYACAGALCQEHKGKVVPIEFYSKVFNKEAQRYTATERECLGLKHALENWSWYLLGSKFNVILYSDHQALQALAKSKINNTRISNWQLALSPYRFTVQYKPGRSAIMAGPDCLSRLLQESWKHYRNNDNEWTTVDFYDEVPAFKQLFERLESDDRDFLSPKVNTETVLESKKGGGKDTTIFKIQQDRSAKEQQSFLDEGHERPQLVESLWDPVRQEDSPPGTPYDHAAERQNAYKYQQAIEYGVHTIALDPYGTTANDVMYMAEGLPLDFDDSTPDKGAIHGAQGRLKGDMYNASNNDMPVSIAKRFNINLKKLLHNNSMQHPGLKAKSKLKANTPIILQNRVIGERTMQGA

SEQ ID NO: 394 - protein, 588 aa, synthetic construct
  source 1..588: note = MG151-65 reverse transcriptase
GAPLRRIHGTEHHINTGNAPPCYKPPYRMSPSELQAVRDQITAMLKQDIIRPSKSPWGAPAILVRRKDLHGKHQPPRFLVDYRALNSVTKSDGFPLPQVIDILDWLGGGKTFAKLDLANGYWQVPVREEDREKTAVVTHCGLFEFISMPFGLKTAGATFQRLMQATFSDFLMGNVTGSSDNQTGFCMPYVDDLIVRSMSDYGALEHYEQIFKRAAQVGMQFKPSKCTFFSTHLEVLGHIVTPNGRIPGPKKVQAISDFPVVNSQTAVQKFLGMVGFYRHHIPSFAQRTYHLRELLQKDRKFQLTAQVEAEFNDLIAALTGPDVLLRYPDWSKPFHVHTDASQLGVGAVLMQDDQHHLRPLQYASQAFSPTQKRYDTREQELYAVKWAVEQWHPYLLGRKFIVETDHANLKWLCSIAPHKAKLARWDSSLAEYDFELRHRPSRSNTIPDALSRYPVTQFIRSENSVSSATFVDILPPADVSAYLVTALGLIPYYFAPLTSTISSFTTAFALTTADTSTSPPTKAEHLSTTSQTEEPLTLLGSNRQDFITLQLQDPTLKLVHKYLSAGSKKSALHDLSSREQTRIQNLAR

SEQ ID NO: 395 - protein, 635 aa, synthetic construct
  source 1..635: note = MG151-66 reverse transcriptase
NAPSQTHAIEVHLPLKEGAVPHRHAPPRLGVEGRRFVRENVADMERRGIVYKTQSPWGSRIVLVRKKDGSLRQCIDYRDLNAKLLVQDSPLPRIDTCLEAMTEGFFNEQIAQLKKEAESPLQGAQDGSTTTTAEPADTVEAPSQPDMAGQFTNNAKFHRGAPRYWCTMDLASGFHGIPIAPESQPQTAFVTPDGKYAYTRLPFGLQCAPSYMVNLMNEVMQGLQWSICVCYMDDTLVWAQTFEEMMERLELVLERFIGANLSLKAKKCVLFATKVDFLGFRLSNQGIEVSPEKVETIRKINSEAINTLTAVRSFLGAASFYRKHIRGFASIAKPLTELTRQGVDVPVESQKEPAQTAIRTLKDALTTAPVLALPRWDMPFIVHTDACITGLGAVLCQRDEEGTERPVAYWGRVLTPAETNYNVSELELLAIISCIKHWRPYLWSASGRKFILRVDHAALLYLHTAKDTVGGGPASRLQRWYLKLQEYRFEVWHRPGRIHYDADFISRMQGSPEYARLTQEADTPDWARASEESVRRHTAARGPSLASQDTESPPEQPNVGDATTGGAALEEGGRVPHGKEEGPGKKNKTETGSPGNPSTDTETREIIALVSTDRAPAGSQLALDLSVQETFDLLA

SEQ ID NO: 396 - protein, 643 aa, synthetic construct
  source 1..643: note = MG151-67 reverse transcriptase
NAPSQTHAIEVHLPLKEGAVPHRHAPPRLGVEGRRFVRENVAEMERRGIVYKTQSPWASRIVLVRKKDGSLRQCIDYRDLNAKLLVQDSPLPRIDTCLEAMTEGFFNEQIAQLKKEAESPLQGAQEESSTATAGQAEAAVAPTQQDMADSPENSAKSYRGAPRFWCTIDLASGFHGIPIAPESQPQTAFVTPDGKYAYTRLPFGLQCAPSYMVNLMNEVMQGLQWSICVCYMDDTLVWAQSFEEMMERLELVLERFIGANLSLKAKKCVLFATKVDFLGFRLSNQGIEVSPEKVEAIKKINSEAINNLTAVRSFLGAASFYRKHIRGFASIAKPLTELTRQGVDVSVESQKEPAQTAIRTLKEALTTTPVLALPRWDLPFIVHTDACITGLGAVLCQRDEEGTERPIAYWGRVLTPAETNYTVSELELLAIVSCIKHWRPYLWSASGKKFILRVDHAALLYLHTAKDTVGGGPASRLQRWYLKLQEYRFEVWHRPGRIHYDADFISRMQGNPEYARLTRDVDTPDWARVSEESVRRHTAAHEQGSVSQDPEVQANPPNAGNATTGGAALKEGGRVPQDREESPSKKSEAKAETLPPTNPPTDAETREIIALVNTTRAPAGGRVSQAPATSEDLSVQETFDLLA

SEQ ID NO: 397 - protein, 621 aa, synthetic construct
  source 1..621: note = MG151-68 reverse transcriptase
TTSLDTLGQYSGPMGPFTFKLTTADLSSAYQRRRFQSPADTDVLRKELQKLIGSQIIEPSKSPVAANPLIVRKKDGSARVCIDYRDLNRITEPNRQPLPSIPQLFHRLLSERKANIFSTLDLAQGFHQLPIAPKQRFLTAFYGPDNKLYQYRVMPFGVRNGPPEFQPRVEEAVADEPSAFVFIDDITVGSCISDLLFHPPVQEADSSGLPTQHELVPQSWDFDVDVHLRDCRSTCLALKRSGWTIKWQKCRWGYFVAQQLGHYVSSFGLQPMADKIAAIVSVRPPTTPTEIKRFLGMVNYYRDHLKDLSAIAAPLNALLRKDVPFLWAAEQQGAFEHVKRLLISAPVLRPADVFKPFVVTCDWSAVGMAGTLEQVDEESRLYVVEYWSKTCTPAEAKYGSFKGEAATLVFVTQHWRHYLVNNLENLLRSDNSALQWLTSSPNLPAQAARWALLLHDVAFRVVHLPGKDNVVCDFLSRPCGAASKPPTAPLGCGSRSWSSSTRSPSSPTASCVCSSSVYPATQCGPSAPVSGEVRSVTAGIPASYEPDPKEIVATFCSGVFVIFDDNGPVVSSSSPSREVWFDTNTLDYLRAAAGPSPETACAAQLLRLLPVEKARVVSRSR

SEQ ID NO: 398 - protein, 521 aa, synthetic construct
  source 1..521: note = MG151-69 reverse transcriptase
EASHEFPPSRVWDHAIELKPGAPSSLPGKLIPLSQPKLAELRKFIKEHLGRGTISPFKSPYTVSFFFIKKKDGKLQPIQDYRPINNWMIKNKYPLLLIPQLVDCLRGCSLYTKFDIQWGYNNVHIKEGDEWKAAFMTNEGLFEPTVMFFGLTNSPATFQAMMNSVFAPEIAEQWLTVYMDDMAIHTAKLPDKMDEQHLQHRELVKRILAKLQEHNLFLKPEKCTFKQPTIEFLEVKVDQGTVQMDDVKIAKVKNWITLHNVTEVCKFLGFTGYYRYFIQDYSKKARPLLYLTHNSTPWQWGQDQQMAFETLQDAMCNKPVLRQPDFTKPFYILTDTSAYGMGAILLQEGKSAILQIETPHKKPELHPVAYYSTTFTETECNYNIYDRELLAIMKAITHWRPYLICMEEPFTIYTDHANLLYWKSLHKLNQRTAHWHSELQDYHFMLEHIPGKTHTAADALSRPSGSDKGKQDNQQITILPEATFIQLADADSDGSLESMITDCESQYEATMKEWEDTYPIT

SEQ ID NO: 399 - protein, 695 aa, synthetic construct
  source 1..695: note = MG151-70 reverse transcriptase
GPPSGLPPDRGIELVLETGSRPMPRTRPLKRLSEGELAELRRQLRDLLDRGWIQHSTAGHAAAVVFARKPDGSWRICYDYRGLNAITEPQVEPLPHIDSLLDETRGAKWFTKFDLAQGYHQVRLREADWWKTSFRSQLGQFEWKVMPFGLQGSSSVLMRVMNAAMTRGLRTNAGGEDAESRPGDTSVPGAIARSDLTQGHRGVPGASGPLHRSVVVYMDDLLCYSSSLEQHLRDVREVLAILRQEKLYVKASKCAFGREELGFLGHRVSGAGVSVDPRKVAAVREWPAPPSNVELRQFVGLCNYYRRFVKGYADIAAPLTRLCGPHAPWHWGPVEQQSFDTLKCCLTTAPVLRTFDPGRRSVLTTDASETAISAVLTQPDDAGHHHPVAYESRKLAAAEQAYLPHVLELLAVVHALRVFRHYLLGSGAPRPPGVLSDFTLRTDNQAVSWLRTKRDINRFMARWLDEIEEFRFDIEHVPGRLNPADPLTRRSFPGAAGTGGGPTAVVDPNLTTAVAAVFIPDSTAAPGQGQGLAAAAGPTPTTAAAAVVTPGSAGTAPGPGGLAAAAGPTPTTAAAAVVTPGSAGTAGLREGHDVANGPNPTTAAAAVVIPGSAAAADPGAASHIPTAFTSLAGAQVWLATGVFTVPAGPTQSERHFLTPNFVAAWSRETLVDPFFGAIFKGAAATVGGAVDCRGR

SEQ ID NO: 400 - protein, 665 aa, synthetic construct
  source 1..665: note = MG151-71 reverse transcriptase
GPPSGLPPDRGIELVLETGSRPMPRTRPLKRLSEGELAELRRQLRDLLDRGWIQHSTAGHAAAVVFARKPDGSWRICYDYRGLNAITEPQVEPLPHIDSLLDETRGAKWFTKFDLAQGYHQVRLREADWWKTSFRSQLGQFEWKVMPFGLQGSSSVLMRVMNAAMTRGLRTNAGGEDAGSRPGDTSVPGAVAWSDLPQGHRGVPGASGPLHRSVVVYMDDLLCYSSSLEQHLRDVREVLAILRQEKLYVKASKCAFGREELGFLGHRVSGAGVSVDPRKVAAVREWPAPPSNVELRQFVGLCNYYRRFVKGYADIAAPLTRLCGPHAPWHWGPVEQQSFDTLKCCLTTAPVLRTFDPGRRSVLTTDASETAISAVLTQPDDAGHHHPVAYESRKLTAAEQAYLPHVLELLAVVHALRVFRHYLLGSGAPRPQGVLSDFTLRTDNQAVSWLRTKRDINRFMARWLDEIEEFCFDIEHVPGRLNPADPLTRRSFPGAAGTGGGPTAVVDPNLTTAVAAVFIPDSTAAPGQGQGLAAAAGPTPTTAAAAVVTPGSAGTAGLREGHDVANGPNPTTAAAAVVIPGSAAAADPGAASHIPTAFTSLAGAQVWLATGVFTVPAGPTQSERHFLTPNFVAAWSRETLVDPFFGAIFKGAAATVGGAVDCRGR

SEQ ID NO: 401 - protein, 456 aa, synthetic construct
  source 1..456: note = MG151-72 reverse transcriptase
DYNEMSGLSWEMVELKLPIRPDKKPVKQIPRRFAPQILSKIKEEIERLLKSKFIKTARYVDWLENIVLVKKKNGTIRVCIDFRDLNLATPKDEYPMPVAEMLVDSAAGFEYLSMLDGYSGYNQIFIAEDDVSKTAFRCPGTLGCYEWLVMPFGLKNAGATYQRVMNSMFHDFIEKFMQVYIDDIVVKSSSEDDHLNHLRQSFKRMRQYGLKMNPLKCAFGVFAGDILGFVVHKKGIEINQNKTKEIMETKAPSTKKKLQSLLGKINFLGRFISNLSGRAQAFSPLLRLKKEDIFKWEPEHQKAFEEIKSYLVNPPVLSPLLKDKRMKLYIAASECTLGSMLAQEDENGVERAIYYLSRVVNDAETRYHPSEKLRLCLYFSCTKLKNYIKHFDVYVYSHFDIIKHMLSKPNLHSRVGKWALALTEYDQSLKSVKGNIVADFIADHSVIEPSLNGAND

SEQ ID NO: 402 - protein, 491 aa, synthetic construct
  source 1..491: note = MG151-73 reverse transcriptase
TIFLEMKGIVKDLGEMKIPLKPDTNSMKQYPYRLTPLYKEKENMELDRMLEAVIIERVEESEWISMIVVQDKKTTSEVHICIDLRKLNNTCLHDSFPTLFTDEVLESVGGQEVYSFIDGLYGYHQVQIAKEYRHKTTFVTEWGCFQYTLIPFGLKNSLVIFSRLVVAAFKYFIRNFLEVYFDDWTVFGLIKYHIGSLRMMLEWCRQYQILLNLKKCIVCALFGILLGHVVRHDGIMVNLAKITTIVDLPPPTTVKQLRTTIKQLRRTLGHTRYYQKFIKGYAEVNNPMEKLLKKCVKFQWSEDFQESLYTLKKKIVTTPILVFSDKKEFIYTSMHCLLHSTLYLRNLENGQLIILFPLLARNYKKKRINTLKLKEKDFPWCMHFRNFDTICLLGGHFKMFIDHSTLKNLVNNPMLGGNIFRWLLLFQDFDFEVIVKLGRLNLGPNHLSRLESGEEIVNINDNLPDAQLFSIMMFDNCYKEIIHLLSVIYPP

SEQ ID NO: 403 - protein, 515 aa, synthetic construct
  source 1..515: note = MG151-74 reverse transcriptase
SLADLKGISPAFCTHRIPMEEDHKPVVDNQRRMSNEMRSVVKKEVIKLLNAGIIYPVPTSEWVSPVHCVPKKGGLTVVKNDKNELIPQRTVTGWRMCIDYRKLNKATKKDHFPLPFIDEMLERLAKNTHFCYLDGYSGFFQIPIHPDDQHKTTFTCPYGTFAYRRMPFGLCNAPASFQRCMMAIFSDFIEDIMEVFMDDFSVHGTSFDHCLRNLEKVLKRCEEVDLVLNWEKCHFMVTRGLVLGHIISEKGIEVDKAKIETVEKLPPPTNIKSLRSFLGHAGFYRRFIKDFSKIAKPLTYLLQKDIPFEFTEECEVAFRKIKELLISAPIIQPPDWNLPFEIMCDASDYAVGAVLGQRKNGKVHVIYYASKTLNEAQVNYATTEKEVLAVVFAFEKFRSYIVNSKVIVYTDHAAIKYLLTKKDAKPRLIRWILMLQEFDVEIRDKKGVENVVADHLSRMDHGKDGSPIEDALRDDTLYAVLDKDSWMRDVIRAIRGEPLPHLNYNSKRRVLAEAK

SEQ ID NO: 404 - protein, 520 aa, synthetic construct
  source 1..520: note = MG151-75 reverse transcriptase
TLADIPGISPTVCTHRILLEEDAKPKRQPQRRLNPLILDVVKKEVTKLLSAGIIYPISDSEWVSPVQVVPKKSGITVIKNDKDELIPTRVQNSWRVCIDYRKLNEATRKDHFPLPFIDQMLERLSGKSHYCFLDGFSGYFQVPIAPEDQDKTTFTCPFGTFAYRRMPFGLCNAPGTFQRCMMAIFSDFLENSMEVFMDDFTVYGSSFEECLKSLTKVLKRCIEKNLILNYEKCHFMVNRGIVLGHLISEKGIEVDKAKIEVISSLPYPTNQREVRSFLGHAGFYRRFIKDFSKIARPLSALLQKDIDFVFDDNCRNAFNELKAKLVSPPILVAPDWELPFEISCDASNSSVGAMLGQRKDKVSRVIAYASSTLNAAQINYTTTEKELYAVVYALEKFRSYLLNSKVIVFTDHAAIRYLFQKPHSKPRLLRWSLLLQEFNLQIKDRVGAENHVADHLSRLPLTSQGVDISNLEIDSFPDALFCAMVSKEPWYSHIVNYLIAGVIPPVMSYSQAQKLKSEAK

SEQ ID NO: 405 - protein, 517 aa, synthetic construct
  source 1..517: note = MG151-76 reverse transcriptase
TLADIPGISPSMCTHRIILEDDAKPSREPQRRLNPPMMEVVKKEVIKLLDAGIIYPIADSKWVSPIHVVPKKSGLTVVENEEGDQVPTRIQNGWRVCIDYRRLNKATKKDHFPLPFIDQMLERLAGNPFYCFLDGFSGYFQIPIAPEDQEKTTFTCPFGTFAYRRMPFGLCNAPGTFQRCMLSIFSDYISKFIEVFMDDFSVFGDSFDSCLDHLSQILEKCIESNLVLNFEKCHFMVSKGIVLGHLISENGMEVDKAKIDVIKTLPYPKTVKDVRSFLGHAGFYRRFIKDFSKLAQSMCQLLKKDEKFEFGDKCKRSFDDLKEKLCSAPIIKVPNWELPFEIMCDASDTSVGAVLGQREGKDPHVIAYASRSLDNAQRNYTTTEKELLAIVFALEKFRSYLLGTKVIVFSDHGALRHLMKKKECKPRLLRWILLLQEFDLEIKDKKGCENLVADHLSRLPLKIEDLVPIREEFPEEHVLAAQVESPWYADLANYIVTKKFPPNFSKAQRDKMKSNAR

SEQ ID NO: 406 - protein, 521 aa, synthetic construct
  source 1..521: note = MG151-77 reverse transcriptase
SIADIKGIRPTLCMHRILLEDNVMPKRDTQRRLNPNMRRWVMKLLDVGIIYPISDSKWVSPVQVVPKKSGTTVVKNEANELVPTRMTTGWRVCIDYRKLNTSTSKDHFPLPFIDQMLERLASHSHYCFLDGYSGYNQIAIAPEDQEKTTFTCPFGTFAYRRMPFGLCNAPATFQRCMMSIFSDMVERFIEVFMDDFSIFGDSFDQCLHNLSKVLARCEQSNLVLNWEKCHFMVNQGIVLGHVISSKGIEVDKAKIDLIASMPSPTSVKEVRSFLGHAGFYRRFIKDFSKIARPLCNLLAKDVDFVFDRDCENAFNALKKMLTAAPIIMPPDWSLPFELMCDASDYAVGAVLGQRVHKKPHAIYYASRTLNDAQLNYSTTEKELLAVIFALEKFRSYLITNKVIVYTDHAALKYLIAKKDAKPRLIRWILLLQEFDLEIKDKKGSENVVADHLSRLVHVSNEEEDSLPLRESFPDEQLFSICALNSLNPLPWFADIVNYLCTNELPTGLSTFQRDKLRKQAR

SEQ ID NO: 407 - protein, 517 aa, synthetic construct
  source 1..517: note = MG151-78 reverse transcriptase
TLKDIKGINPLICTHRIHLEDNARTSQQPQRRLNPHMKEVVKAEVLKLLDVGIIYPISDSKWVSPTQVVPKKSGITVVKNEKGELIPTRVPSSWRMCIDYRKLNTATRKDHFPLPFLDQILERVAGHPYYCFLDGYSGYYQIPIALEDQEKTTFTCPFGTFAFRRMPFGLCNAPATFQRCMLSIFSDMVEHYLEVFMDDLTVFGNSFDNCLDNLENVLKRCEEKGLVLNWEKCHYMVASGIVLGHVVSSKGIEVDKAKVEIISHLPPPKTVREVRSFLGHAGFYRRFIKNFSTISRPLCNLLLKDASFDWNQDCQKSFEKIIGHLTSAPIMQSPDWSLPFELMCDASDFAVGAVLGQRKEGKPYVIYYASRTLNSAQMNYTTTEKELLAVIFALDKFRSYLIGSSTIVFTDHAAVRYLMSKQDAKPRLIRWILLLQEFNITIKDKKGVENVVADHLSRLTTESSFDITPINDSFPDDFLFSVTTIPWFANIVNFLVTGEMPSQWTPQDKRKFLTEVR

SEQ ID NO: 408 - protein, 516 aa, synthetic construct
  source 1..516: note = MG151-79 reverse transcriptase
SMSDIKGISPTIVQHRIHLLEESKPKREFQRRLNPVMKEAVKKDILKCLDNGIIYPISDSTWVSLVQVVPKKSGITVIKNQENDLVPTRIQTGWRVCIDYRKLNAATRKDHFPLPFIDQMLERLAGHDYYCFLDGYSGYNQIPIAPEDQDKTTFTCPFGTFAYRRMPFGLCNPPATFQRCMLSIFSDMAEKNLEVFMDDFSIFGDSFEQCLHHLNLVLKRCKEKDLTLNWEKCHFMVRQGIVLGHIISKNGIEVDKAKIILISSLPHPKNVKDIRSFLGHAGFYRRFIKDFSKIARPLTKLLSKDNPFNFSSECITAFELLKKQLISAPIMHAPDWSKPFELMCDASDFAVGAVLAQHIDNKPHVIYYSSRTLNDAQLNYSTTEKEFLAVVFALEKFRQYLIGSEITIFTDHSALKYLLLKKDAKARLIRWILLLQEFDLKIKDKKGADNVVADHMSRLQNIPNSEVPINDFFPDEQLFTILKEPWFADIVNYLVTRKIPAEWSKQDRYRFYSEMK

SEQ ID NO: 409 - protein, 647 aa, synthetic construct
  source 1..647: note = MG151-80 reverse transcriptase
PLRVEDETKINPEVWYTPDTVGKLNVEPFMVTIRDPEVPVRIKQYPIPLEGRQGLKPEIQRLIKQGLLEPCMSPFNTPILPVKKADGGYRLVHDLREINKRTVTRFPVVANPHTLLSQLGPNDRWYSVIDLKDAFWACPLKEECRNYFAFEWEDPDTHRKTQLRWTVLPQGFTESPNLFGQALEQILQDYQIGDTLTLVQYVDDLLIAGEDEERVREESIKLLNFLSLKGLKVSKSKLQFVEKEVKYLGHRLSQGTKKLDPERVKGILSLPSPKTKKQVRQLLGLFGYCKQWIEGYSGKVKFLYTKITKNGLLKWTQEDDQRLKELKTELVNAPVLSLPDLKRPFFLFVNTEEGTAFGVLAQEWAGKKKPVAYISKLLDPVSRGWPTCLQVVVAAALLVEEAHKITFGSELRVLSPHNIRGVLQQKAEKWITDARLVKYEAILITSPHLTLETTSLQNPAQFLYGEPSQDLFHDCLRNIEEQTKIRPDLEEEELGKGEKLFVDGSSRVVEGKRKSGYAIIDGKTFKVIESGPLSPSWSAQACELYAVLKALQLLNGKVGTIYTDSRYAFGIVHTFGKIWEERGLINSRGKSLVHQELISQILQAIRGPSEIAVVHVKGHQRGLNPLVRGNNLADQEAKRAALSALDL

SEQ ID NO: 410 - protein, 649 aa, synthetic construct
  source 1..649: note = MG151-81 reverse transcriptase
ALTEVDEQEIADKVWAEKGGASRMQISPIQVQVKPGVTGLCTPQYPMSRKGREGLKPVIERLLEQGMLEPTMSPFNSPILAVAKKDGKYRLVQDLRNINKVIVPRFPTVPDPYTILGMIPTEHRWFTVIDLKDAFWSCPLDEDSRPLFAFEWTDPETGKKGQLRWTVLPQGYTESPLLFGQALSEKLQEFDKGPGITLVQYVDDLLLSGKKREEVRQGSIRLLNWLSNQGLKVSKEKLQFVEQKVKYLGHYLQHGTRSLDPERIRGIMELQPPRNKTEVRKALGMIGYCRLWLDQYAVLAKFLHQKLEGPGDQVEWVETDSQKWETLKEALTSAPVLALPNSKLPFHLYVSVAQGVAIGVLAQKRGGKYQPVAYLSKELEPVVKGWPVCVQAVAAAAVLVIGSKKLTFGGALIVHSPHQVNPVLSQLATTWMTEGRLLKYETILRTSPDVVIGTDRNLNPAEFLSGERKEWEPEDHDCLSLVEMLTKVREDLEETPLEEGEKWFIDGSSRVEEGKRKSGYAIVDGVGEVIEKGALSPTWSAQKCELYALARALELAEGIRATIWTDSKFAWGVVHTFGKIWQERGYIKANGKEVEHVQLVDRTLEALKLPDKVAIVHVAAHQKGDTPEIVGNRWADKWAKEAAGELTLA

SEQ ID NO: 411 - protein, 653 aa, synthetic construct
  source 1..653: note = MG151-82 reverse transcriptase
PLTMDDQNQINPDVWYSPDTISKLEIPPIKIQISEPHIPVRVKQYPISLEGRRGLKPEIDRLLTQGILEPCMSPFNTPILPVRKPNGKYRLVHDLREINKRTITRFPVVANPYTLLSKLGPHNSWYSVADLKDAFWACPLAEECRDYFAFEWEDIETGRRQQLRWTVLPQGFTESPNLFGQALEELLKEYQVQTGNVLLQYVDDLLIAGNNKEDVRKESIRLLNFLAQKGLRVSQEKLQFVEEKVKYLGHYLFNGKKILDPERIKGILELPMPVTKRQIRQALGLFGYCRQWIENYSFKVKFLYEQLSKDKILKWTPRDQEQFANLKRELSQAPVLSLPDLKRPFHLFVNIHEGTAFGVLTQEWAGQKKPVAYLSKLLDPVSRGWPSCLQIIVAAALLLEETNRITFNGEVVLYAPHNIRGVLQQKAEKWLTDNRLLKYEGILIESPKFSLKTIGAVNPAEFLYPGEGNELLHNCFQTIEQQTRIRPDLEEEELQCGEVLFIDGSSRIVEGKRLSGYAIVKLEKGEFKTIESGPLSASWSAQACELYALWKALVSLKGKDGTIYTDSRYTFGVVHTFGKIWEERGFINSQGKELIHPELIRRVLGALKVPNKIAVVHIKGHQRGTNYQVRGNNAADIEAKRVAGNYNTILTIQ

SEQ ID NO: 412 - protein, 648 aa, synthetic construct
  source 1..648: note = MG151-83 reverse transcriptase
PLRVEDEKEVNPEVWYTPETIGKLQIPPFSVTIINPEVPIRIKQYPIPPEGKWGLKPEIERLLEKGLLEPCMSPFNTPILPVKKSDGSYRLVHDLREINKRTVTRFPIVANPYTLLSRIGPENHWYSVIDLKDAFWACPLSEESRNYFAFEWEDPETHRRQQLRWTVLPQGFTESPNLFGQALEKILQEYVVNENTILIQYVDDLLIAGKEEAIVRQESIKLLNFLALKGLKVSRSKLQFVEEEVKYLGHYLSKGEKRIDPERVKGILSIPPPTNKKQIRQLLGLVGYCRQWIENYSSKVKFLYNKLSQDNLLKWTMEDEQHLEQLRKDLITAPVLSLPDLKRPFSLFVNTDEGTAYGVLTQDWAGKKKPVGYLSKLLDPVSKGWPTCLQAVVAAALLVEEANKITFNGELRVLSPHNIRGILQQKAEKWVTDSRLLKYEGILIDSPKLSLEVTTLQNPAQFLYGEPWDSQLIHDCFITIESQTKIRPDLEEEELGEGEKLFVDGSSRVVNGKRKSGYAIIKGPNLKVLESGPLNHSWSAQACELYAVLRALEYLRNKVGTIFTDSKYAYGVVHTFGKIWEERGLINSQGKDITHQELIVQILKALRSPKGIAVVHLKGHQKGVDIRNRGNNVADREAKRAALKDWTP

SEQ ID NO: 413 - protein, 656 aa, synthetic construct
  source 1..656: note = MG151-84 reverse transcriptase
VLREEDEKKINPIVWAKPGNPGLMNVTPAKIHLKTDTPVYRPQYPIRPEAEEGLKPVVRELLDDGLIEPSDSPYCTPILPVKKPNGTWRMVQDLREVNKVVIPRAPIVPDPHTILRRIPDTHVWYTVIDLKSAFFSVPVDPESRPIFAFQWPHPETGKLTRFQWKILCQGYCESPTIFGEILEELLQGWSPPEGTLLTQYVDDLLISGEEGKQVRKASISLLNFLGEKGLRVSLDKLQFCEPEVKYLGLILKKGTKCINPKRLEGIQNLEMPKTKRQLRSFIGTINFCRQWIEGFSELIQPFLKKLLKEEPETLVLEKADYKLFERVKKVLVSAPALGLPNPNKPTHLFVTTGNGVAKGVLAQKKAGQYQPIGYLSKHLDAVVLGWPTCLQACAAAAELVKLTRKLYPFEAIVLHSSHQLKTILTHTARRWMTDSRLLQIEAILLEKPDLLLTTTDHYGPAGGLSEAVRKEMCNEHDCIAITDLQTKFREDLQEEPIEGAWNLYTDGSSRVVNGKRITGYAIVEDGGLEVETGPLPPSMSAQTAELYALKRALEIGKEKNVNIWTDSKYACGVVHVFGKIWSERGLLTSQGKNLAHHRLVLDTLEALSFPSRVAIIHIPGHQKGNAPEIVGNRLADELARRAAEREFDTARLAALI

SEQ ID NO: 414 - protein, 645 aa, synthetic construct
  source 1..645: note = MG151-85 reverse transcriptase
EGADEILNKIPEGVWSTGPYDVGFCKKYKPIELTVSDTQVVYRKQYQWPAEADSGMEETLRGLWQAGVLEESHSLWSTPLRPVKKADGVSYRMAHDLRAINDAIMTPVLPVPDPHRILTSLSPNLKWFTVIDLANAFFCLPLHPNTRKYFSFTYKHTRLQYNRLPQGCKNSPGLFNQALKDMLSDLQLPNNCVLVQYVDDLLLACETPEVCLEATKRLLLKLHSCGFKVSRKKLQCCRKAVNFLGRVVSAHGSTMSTAHRNAILHHPKPETVKDMLSFLGLCGYSRNYISCFVERIAPLRALIREKGNKNTTAQLNWTEEATNCFISLVGALASAAALAVPNYDLPFHLNVSLSASVVNGVLFQKRDGGRCVMMYCSTTLDPMEQKQPQCTRYAAGLATLITKTAHIVKGYPLNILTEHSVSAYVASASFTMSSLRQTRLMKILQAPNIQYVHTGINMADCIGATGTPHTCVFQVQQDLKLRPDLQTSPLGRGHLAFTDGCCYRQTDGSLRAAAAVVRYDSGSDVFTTVATVQLPDSPSAQAAEVLALCLALEAYVDQEVTVYSDSAYAVSAAVLDLAAWKRTGFVTAKGVPIAHRSLMERLAVSIMLPRAVAIVKTAGHSKANTMTARGNDAADRAAKKAAGYQ

SEQ ID NO: 415 - protein, 649 aa, synthetic construct
  source 1..649: note = MG151-87 reverse transcriptase
TPEEKETLLADVPASVWAKDSYDIGTLTTAPPLIIKAKPLSRYPAKAQYPLSKEAEEGIEPTFNALLERGAIVPCPYSPCNTPILPIKKPDNTWRFVQDLRLVNEAVEPRHPIVPNPCTILSTIPSNAKCFTVIDIKNAYFSIRVDPASQFWFAFTYKGQRFQWARLAQGYVESPSYFCECLTECLSKFTPPGGSTIISYVDDILLSSPSKKVCKMDTVALLTYLAIVGLKVSKQKLQLCQERVKYLGHILTPGSRALDASRISAITACPRPKTKQQLLRFLGMTGYCRAWILHYAERAQPLQSCANACKNLTDNLTWTDDCDKAFVDLKVALASTPALGLPNYDLPFHLFVCEKAGFMSGVLCQQHGGQYRPVAYLSKHLDPVARGMIPCLKAVAAAASGVLSCADLVLLHPLTVHVPHEVHSLLMQAKTSHLTPARLLSYQHVLLTLSHVTLARCTSLNPATLLPTPDDGDTHDCCEVVSICTKPRPDISEIPLTNPDLVFFVDGSSMRLGSGEVGSSYAVVNHFEVVEAYSIPGTYSAQAAELVALLRACILAKGKSVCIYTDSRYCWGIVHDHGAIWKERGFLTAAGKPIQHKDLIASLLEAIQFPASVAVIKCTAHSNHKDEVSSGNNRADAAAKAAAKGGQRI

SEQ ID NO: 416 - protein, 652 aa, synthetic construct
  source 1..652: note = MG151-88 reverse transcriptase
NHVRADEMLATIPESLWTSHPHDVGRIEGEVVLTLKPTVTKPIWRAQYKLKPEQVEGIAETVTGLLRAGVLREAEGARWNTPILPVPKAGNKGWRMVHDLRLINEATTTLALPVPDPYVALRAITPEQKFFSVCDLGNAFFCLPLAEECQEWFSFTYGNKQYTYTRLAQGYKDSPGLFNQALNQILENMILPEGATIIQYVDDLLVATKTAEDSLAATKTLLMTLADAGFKVKREKCQITRRSVEFLGRIVGEHGTAMSDMHQDAILQYGKPKTVQDMLGFLGLCGYSRTYVPEYVTLTQPLREMVTEVGHRALKDDLNWTVDRDKAFQKVKSALSAAAHLASPNYEKDFYLDVAETEGIVNAVLYQRERGERKILSYFSCKLDSVEVGKPPCIRFLAALAKAIEKTAHIVLCHPLIVNTDHSVTALLASSAFSFSATRQIKIDDTLKGPHIMFKAPKDNHANMAKGVNGGGLLQHDCIRRVEGDSKLRENLHATPLDDPDWELFTDGCSYKSDIGNRAGYAVVKWDNDKADIIQAGEIPQPASAQVAEIKALTEALKLSAGHKVNIYTDSAYGFGAVHYEGPAWVRRKFLTAAGTPVKHEHHLRELIEALNGPTEVAVIKVTGHSKKNDKESNGNAAADAAAKLACNYPVK

SEQ ID NO: 417 - protein, 650 aa, synthetic construct
  source 1..650: note = MG151-89 reverse transcriptase
NHPDSDDIINAMPASLWSTGPADVGKLQIPPIKINLKPDTVPIWKYQYPLSREKIDGIRPVIEDLLRSGVLRQTVSDWNTPILPTPKPGKNVYRMVHDLRPINQVVLPSHCKTPNPFVMLTSITPDHKFFTVIDLANAFFSVPLHEDCQNIFAFTYENSQFSYTVLPQGLKNSPSLFNNILKTHLSELTPHLPPNTVILQYVDDILIAAPSTAKNLQATSLVLHFLATKGYKVSKDKLQICRPTVHYLGRLITSGATSMSPEHKSSILNHPKPNTGKSLLSFLGLTGYSKQFVPNYQDLVSPLRALIRQKGYANLNAPLHWTPEAEICFTALKQALAQATQLNPPDYSLPFHLDVSEQEGTVKAVLYQKQGGTRTVLMYYSSKLDNVEIGHPPCTRHCAAIAKALIKTAHIVMQHTVHVHTNHGVAAFLDSTAFTLSTKRQQKLKNILDQPNVLYTSEGVNMAAEISTQGEPHDCAVLAETDMKIVETLTPNPIENPDLVLFCDGSSRRRLDGTLSAAYAVVKLVPKSQLVTIEATHIGNNSAQKAEIMGLTAALNHAHGKTVNIYTDSAYAHHAVYVDLPHWSRKGFVTATGTPIKHLPEIIALQEALSRPKGVAVLKCKGHQSDNTIVAKGNAAADESARRLTEDDKI

SEQ ID NO: 418 - protein, 650 aa, synthetic construct
  source 1..650: note = MG151-90 reverse transcriptase
TPSIPNLHGVPSSLWATHKEDAGLVACAPYEASIKHTDPIYKKQYPLTEEKALGIDKVLHQLLLQGVVVPCKSPYNTPINPVKKPDGTWRLTQDLRAINDIIIPVSPIVPDVPNIMASIPSSHTHFSVVDLCSAFFSIPVEPQTQPLFAFTHRGRQYTWTRLPQGFVDSPAVFALTVRQCLTDVCLPPNSCFLQYADDILVTGQDEATCHQATIAVLQRLAETGFKVSPSKLQLCKTSVTYLGYLISQGSKALTPSRVSIILEGKKPATKQAMMAFLGLINYCRQWIPDCSYYDKCLRSAFTHSDPMSSLITWTEEMTQAYGALKKALCSAPALGLPNYDLPFHLYVTHHADTASAVLAQEHGGSFRPCAFLSKTLDTVAQGLPTCLKAMAAAALMVLDAEKLVLGHPLVLHCEHQIQYMLKHLSTQHLSVQRRCGYEQTLLATENLTIKPTSSMDTVAHALQRFLQVPADHFSEDHNCVDSVVSDCSLRPDLKSTPLQNVRNLYVDGSCSKPQDGVYLTGYAVCELPDTVLEAAAIPFSSAQAAELIALTRACVLAADQDVNIYTDSRYAFGVAHDFGAIWASRGFVAADGKPISHSSLVMDLIKAARLPRSLAIIKTRGHSTFDTEEAKGNNFADTQAKLAAQSGKQP

SEQ ID NO: 419 - protein, 660 aa, synthetic construct
  source 1..660: note = MG151-91 reverse transcriptase
STQMESDSKREEMLQKVPECLWSQHSTDIGLVKSAQPVKVELRPGTSPPWKNQYPLKEEAIRGIEPQIEGLLKADVLKITQNPQSNTPLLPLKKPDGSYRLVHDLRAVNEVVADFPAEVPDPHTLLAQIPPDATHFTVLDLCGAFFSVPLSIESQGFFGFTYNGQFYESKRLPQGFKHSPHIFNKVLREDLAGIDQILKSTVVQYVDDIIICSPDEETCHKDSIKLLQILAEKGHKASQKKLQYCREKVIYLGQTITKGHRSISDSHLEAIRKAPKPRTVREMLTFLGIAGYSSSWVEDYASLTGPLRAMIKDTGNAQLHCNLSWTQDGLLAFETIKQRLQEAPALALPDYSKNFLLYVSTSTGGRYACAVLCQPTGTGTTPQPISYYSTAFSEVELGLPLCYRALVGVSLMYDKASSVTMGYPVTILTHHSVRNLLNYGKYTLTMSRLRDYHRLLEQEDVTLVRCVTVNPAESLPTSEDGEPHDCIQESEKYSKLRSDLQALPLSEADVEYWTDGSCYRVGDKLSAGYAVVKAQGTEFVVEKAGIVPQPASAQLAELVGLTEACLLAEGKRVTIYTDSAYAHNVCHLFGAVWKNRGFKKTDGSPIQHHAQIMKLLHAMMKPKEIAIAKCAAHKMDVSKVTQGNKAADEAAKAVTGADKL

SEQ ID NO: 420 - protein, 651 aa, synthetic construct
  source 1..651: note = MG151-92 reverse transcriptase
SLTPFEREALLASVPESAWAKDSYDFGTLTTAPPLVIHAKPGSHFPAKAQYPLSKEAEKGIEATFKALLERGAIVPCPSSPCNTPILPIKKPDNTWRFVQDLRLVNEAVQPRHPIVPNPCTILSSLPPDVKCFTVIDVKNAYFSIRVDPSCQFWFAFTFKGQRFTWVRLPQGYVESPSYFNESLVFCLSKFTPPGGSTIISYVDDILVASPSKEMCKMDTVALLTYLAIVGLKVSKQKLQLCQERVKYLGHILTPGCRALDASRISAITACPRPRTKQQLLRFLGMTGYCRAWILDYAERAQPLQTCANACKHLTDHITWTDDCDKAFVDLKLALASAPALGMPNYDLPFHLFVCEKAGYMSGVLCQQHGGQYRPVAYLSKQLDPVARGMIPCMKAVAAAASGVLSCADIVLLHPVTVHVPHEVHSLLLQAKTSHLTPARLLSYQHVLLTLSHVTLARCTTLNPATLLPTANDGDTHDCCEVVTMCTKPRPDISETPFSNPDLIFFVDGSSMRLGSGEVGSGYAVVNQFEVVESYSLPGTFSAQAAELIALFRACILAQGKSACIYTDSRYCWGIVHDHGAIWRERGFLTATGKPIQHKDLIASLLEAIKFPTSLAVIKCAAHNNTSDEVSLGNNRVDAAAKAAAKGGVRI

SEQ ID NO: 421 - protein, 651 aa, synthetic construct
  source 1..651: note = MG151-93 reverse transcriptase
PLSEEHNVLLACIPHDLWSQHKTDVGLVRSAQPVHIKVKTGIMLPYKRQYPLKPHQTEGIGPTIKGLVAAGVLKTTKSPCNTPIFPIKKINSGDYRLVHDLRAINSIVDAETPVVPDPHTLLSNIPHDACWYTVIDLCSAFFSVPLHPDSQYLFAFTYKGQQYTYTRLPQGYVESPSVFNRVLANDLQHLDVTSTVLQYVDDLLVCSNTQEQCTQDSLTVLKALEKGGHKVSKDKLQFCQPQVEYLGRQLCGNKRAIAPSQIEAVSKAPKPLTVSHMLSFLGMTGFSRPWICDYAIKTAPLRGLIRAAGQNNGSAVLHWTTEAEGAFQALKQDLQTAPALGNPNYANMFHLYVAEKSGYACAVLMQDTPTGKQPLAYYSTKLDNIEMGLPPCYQGLAAAAFAFQKASAITMGHPTTLYTSHQLHALITSPRFVLTQARKTGYEVILAAPELNIQRCATINPATRMVIPLEGTPHDCIRSTDEFLRPRQDLHNQPIPAELTLFVDGSCFRDNTGNHAGYAIVQLHPDDTFTEVQTIKLAQPCSAQLAEIKALTAACQLAAGKTLNVYTDSQYAYAVCHIHGVIWKQRGFLRADGSPVTHGEAISALLDAIHHPKALAIIKCAAHQKIDSLIAKGNNLADEAAKRAATSTCIG

SEQ ID NO: 422 - protein, 650 aa, synthetic construct
  source 1..650: note = MG151-94 reverse transcriptase
CLSLEEQETLFASVPDSIWAKDDYDFGTLSTAPPLVVHARTIYYPSRAQYPLSKEAEQGIEPVFTSLLNRGAIVPCPSSPVNTPILPIKKPDGTYRFVQDLRIVNDAIHSRHPIVPNPCTILSSLPATATWFTVIDIKNAYFSIKVDPASQFWFSFTFKNERFTWARLPMGYSESPSVYNEAMVACLRNFTSPAGSTVISYVDDILIGSPSKEACKIDTVALLTYLASVGLKVSKHKLQLCQEKVKYLGHILSPGNRALDATRITAITACPRPRTKQQVLRFLGMTGYCRAWILNYSEIAQPLQLCATACKNLTDVVTWTDDCETAFRKLKQALASAPALGLPNYDLDFHLFVCEKGGYMSGVLCQLHGGKHRPVAYLSKRLDPVARGWVPCLKSVAAASSAVLACADLVLLHPLTVHVPHDVHALLMQAKTTHLTTARLLSYQHVLLALSHVKLVRCSLLNPSTLLPTEEDGESHDCCDVITICTKPRPDISEEPLSNPDLLFYVDGSCLRLDSGEVGSGYAVVNHIRVVESYSLHSSFSAQSAELVALIRACILASGKSVCIYTDSQYSWAVVHDHGAIWKERGFLTAAGKPIQHKDLIELLLKAIQLPTAVAVVKCAAHTKNNDEVSLGNARADAAAKSAAKGGVRN

SEQ ID NO: 423 - protein, 653 aa, synthetic construct
  source 1..653: note = MG151-95 reverse transcriptase
FNSDLGTDILTQVPDQLWSRHETDVGLAVSASPVVVKLKPGAVLPWRPQYKLNPADEEGIANLIDGFSKAGVLVEISSPCNTPILAVLKADKSKYRLVHDLRAINAILEEVAADFANPHTLLNAIPTKAKFFTVIDLCSAFFSIPLAEESRYLFSFTFRGRQYSYARMPQGLTSSPAWFDRVVSQDLQELDLSGVIIRYVDDVLVCSDTIEDCQRDSIKVLQRLAECGHKASRTKLQFCQPQVEFLGRVISHGTIALSPDHLKGISRAPRPQTCAQLTTFLGMTGFSAEWLEDYAVKTAPLRDLLKSSEDKTLKKSLEWTTEALMAFDVLKQELQSAPALKMPDYDKTFHLYVSNRCNMYAAAVLTQDSCSGGRKQPIAYYSARLDDVARGWPPCYQGLAAVHMAYEKASAITKSYPVVIYTHHKITELINHSKLVLTTARCLQYLPLLTYPDVTIKRCETTNPANMLPFEFEGETHECVAETTRYTKLRPDLESEPLDDAQVIYFVDGSCFRDHMGTHAGYAVVQHKEGTFVTVKAEKCLQPCSAQLAELYGLTAACELAKNLSANIYTDSAYAHGVCHLFGAVWKLRGFQKSDGKPVRHGKQIMKLISAMMLPHRLAIIKCPAHQKDNSSTTMGNNAADEAAKCASGCKVA

SEQ ID NO: 424 - protein, 645 aa, synthetic construct
  source 1..645: note = MG151-96 reverse transcriptase
AALPELTDVDPRLWAEHKDDAGFIDVPPYVANLLKDTPVYCKQYPLSKEKEDGIRPVIKQLLAQGILIHTHSPYNTPINPIKKANGSWRLTQDLTKINELIKPLAPIVPDVHTILNSIPASHAYFTVIDICSAFFSVPVDPVTQPLFAFTFDHAQLTWTRLPQGFSDSPAVFSALVHATLMDAKLPPDTCLLQYADDILVTGASEDLCTAASTIVCNILAEAGFKASKDKIQWVKRKVEYLGHELSQGTVRLSADRIKAIATYKHPSTKKQMQSFLGLVNYCRSWVPNCSMYDKILRAATLQDSDEITWTAEMDQAFTYLKTSLIRPPALGLPVYSQEFHLYVHEDGGTAAAILAQEHGGNFRPVAYLSKTLDSVAKGLPACLRAVAAAAIMVQDAERIVLSHPLVVHTNHQVGVIMRNISTQHMTAQRRSGYEAILLATANLTLKPTSVVHSPTLCLHKLLTQGDFEDDDHDCLARIQISTACRPDVSTSVLEEGNHWYVDGSCFKPNDNEYLCGYSIVELPDRIIEAYSLPYKSAQVAELIALTRACQLAKGQCINIYTDSKYAHGIVHDFAKLWEERDFKTSEGKPISHHSVVAELIHAAQLPSKLSVIKVAGHVAGESEEAKGNRLADEVAKWAAKDVILS

SEQ ID NO: 425 - protein, 651 aa, synthetic construct
  source 1..651: note = MG151-97 reverse transcriptase
NTDHPALSHILAGLPDTLWSQGSADVGLVHCPPIYIPLKPGYQPIWKYQYPLNKEKIEGISGTIKGLLEAGVLRETESLWNTPILPTPKPGKRDYRLVHDLRPINQATATTTWSTPNPYTMLAALSPTHNWFSCVDISNAFFSCPLHPDSQDMFAFTYEGQQYTYTRLPQGFTESPALFNKILRDQLQSLPIPQDVVLLQFVDDICLAAESEASIIHATKILLERLFDLGYKLSKEKLQLGRRRVTFLGRVVAAGCTSITPSHRTDILSHPKPTTVKGMMAFLGLTGYSRQYIPDYAALTAPLRLLITTAGHANLKAPLVWTTDADQAFITVKQLLSAATVLAPPDYTQPFHLDVSEKEGFVNAALFQKGGGGERHVLMYYSSKLDNIEIGHPVCTKHVAAIAKALEKTSHLTMCHQTIVHTIHGVAAFLNSSAFSLSHRRTDRIKDLVLQSHITFTGEGVNMAENMSIGEAHNCVKDTETQMRVTPTLSSVPLSNPDLVLYCDGCCYRKNSGELIASLAVVSGKIGNNLTTVKAEIVPQPASAQKAEIAALTEACRYAEGKTVNIYTDSAYAHQAIHVDIPHWLRKGFVTSTGMLIKHLKEMTDLVEAVQLPTKVAILKCKGHQKSNTEIAKGNEAADHAAKTTAGYYDQ

SEQ ID NO: 426 - protein, 638 aa, synthetic construct
  source 1..638: note = MG151-98 reverse transcriptase
DNIKQLSVLPGLSEDPSAVGLLQVKEQQVPIATKAVHRRQYRTNRDSLLPIHKLIRQLESQGVISRTHSPFNSPIWPVRKASGEWRLTVDYRGLNEVTPPLSAAVPDMLELQYELESKAAKWYATIDIANAFFSIPLARECRPQFAFTWRGIQYTWNRLPQGWKHSPTICHGLIQTVLEQGSAPEHLQYIDDIVVWGDTAEDVFKKGEQIIQILLQAGFAIKRSKVKGPAQEIQFLGIKWQDGRRHIPADVIDKITAMSPPINKKETQSFLGVVGFWRMHVPNYSLIVSPLYQVTRKKNDFTWGPEQQQAFEQIKHEIARAVALGPVRTGQDVKNILYTAAGEKGPTWSLWQRTSGETRGRPLGFWSRAYRGSEECYTPTEKEILAAYEGVRAASEVVGTETQLLLAPRLPVLNWMFKGKIPSTHHATDATWSKWIALITQRARMGNFSRPGILEVIMDWPEGKKFETSPGEEVSRAKEAPPYNELPGNEKKYALFTDGSCRIVGKYRRWKAAVWSPVRQVAEATEGKGESSQFAEVKAVQLALDVAEREGWPVLYLYTDSWMVANALWGWLQQWEQNNWQRRGKPIWSAELWKDIAARIKNMVVKVRHVDAHMPKSRATEEQKNNHHVDQAAKIEVA

SEQ ID NO: 427 - protein, 614 aa, synthetic construct
  source 1..614: note = MG151-99 reverse transcriptase
RAVQAIIRGHAEIEPICLPQPRRITNTKQYRLPGGQQEITKTVQELERVGIIRPAHSPYNSPIWPVRKPDGTWRMTVDYRELNKVTPPIHAAVPNIASLMDTLSREIETYHCVLDLANAFFSIPIAKESQDQFAFTWEGRQWTFQVLPQGYVHSPTFCHNLVASDLANWNKPSTVKMFHYIDDLMLTSDSIEALEKTVPSLITYLQEKGWAINPQKVQGPGLSVKFLGVVWSGKTKVLPSAIIDKIQAFPVPTKPKQLQEFLGILGYWRSFIPHLAQLLKPLYRLTKKGQVWDWGRTEQEAFQQAKIAVKQAQALGIFDPTLPAELDVHVTQEGFGWGLWQRQGSVRIPIGFWSQIWHGAEERYSMVEKQLLATYSALQAVEPITQTAEVIVKTTLPIQGWVKDLTHIPKTGVAQSQTVARWVAYLSQRSRLSSSPLKEELQKILGPVTYHSETPEEIVVTCPEKSPVQEGKYPIPEDAWYTDGSSRGNPSRWRAVAYHPSTETIWFEEGDGQSSQWAELRAVWMVITQEPGNSALNICTDSWAVYRGLTLWIAQWATQDWTIHARPIWGKDMWVDIWNVVRHRTVRAYHVSGHQPLQSPGNDEADTLARVRWL

SEQ ID NO: 428 - protein, 654 aa, synthetic construct
  source 1..654: note = MG151-100 reverse transcriptase
PLRQEDEKKINPEVWYNPGSVGQLKIAPFTVKIKNPEIPVRIKQYPISPEGKRGLKPEIDRLLSRGLLEPCMSPYNTPILPVKKADGSYRLVHDLREINKRTIARFPVVANPYTLLSKLGPDNVWYSVIDLKDAFWACPLDESSRDYFAFEWEDPETGRRQQLRWTALPQGFTESPNLFGQALEQILKDYQTKSGVTLTQYVDDLLLAGKDEEDVRKESIRLLNFLGLKGLKVSKTKLQFVEEEVKYLGHYLKKGEKRIDPERIQAILSLPTPQNKRQIRQILGLTGYCRQWIENYSNKARFLYQKLTQEGLMKWTQRDTEKLQELKESLVHAPVLSLPDLKRPFFLFVNVAEGIAFGVLTQDWAGKKKPVAYLSKILDPVSRGWPTCLQILAGCAVLVEETRKITFNSSLKVLSPHNIRSVMQQKADKWISDARLLKYEGILLEAPDFALETTTLQNPAAFLYGEPEQEPLVHDCIATIEEQTKIRPDLEEEELDEGEKLFVDGSSKVIEGKRKSGYAIIGGTDLQVIESGALDKSWSAQACELYAILRALTLLKGKEGTIYTDSKYGFGVVHTFGKLWEERGLINSQGKDLVHQKLIIEVLRALRGPKKVAVVHLKGHQRGLDFRSRGNNAADQEAKRAAMREMVLREKQGN

SEQ ID NO: 429 - protein, 664 aa, synthetic construct
  source 1..664: note = MG151-101 reverse transcriptase
PLILYLSTPSTPTPDQLPFVNPQVWDTSEPVVASHHPPVKIKLKDGSKFPSRPQFPISLLHRLGLKPIIERLKRQGLLIPISSPCNSPILPVRKPSGAYRLVQDLRLINEAIVPLHPVVPNPYTLLSHIPPNTTHFTVLDLKDAFFTIPLHPDSYFLFAFTWEDPDTHTSGQLTWTVLPQGFRDSPHIFGQALAADLQQCLLKASTLLQYVDDLLLCSPALTISQDDTSSLLNFLGSKGYRVTPSKAQLCTPSVTYLGIHLTPTSKSLTGDRIRLLRELQPPQTADEILSFLGLAGFFRHWIPNFSILARPLYQAAKDTPQGPLSDPSSVRRLFSKLRDCLTAGPILTLPDPSKPFHLYTDERSGSATGLLAQPVGPTYRIIAYLSKQLDGTARGWQPCLRALAAAASLTKEALKLTLGQPLVVYSPHRLRDLLSHRSLAHLTPSRLQLFHLLFIENPQISLSTSPRLNPATLLPTPSPTSEPTHSCPQLLEDLTPPHPGLSDQPLSNPDRILFVDGSSFLAADGRRHAAYAVVTPETVVETVPLPIGTTSQKAELIALTRALHLSKGQRVTIYTDSKYAYLIAHTHSVLWQERGFLTTKGTPIVNGPLIAKLLEALSLPTEVAIVHCRGHQTSKDMVSIGNNKADSVARKTALSNPVSPILFL

SEQ ID NO: 430 - protein, 673 aa, synthetic construct
  source 1..673: note = MG151-102 reverse transcriptase
TCPISEEYLLLEKPEQKASPLIEKWKKTIPTVWAETNPPGLAIQQAPLVIQLTATATPIRVRQYPISQHAREGIAKHLNRLREAGILVPCHSPWNTPLLPVPKPGTLEYRPVQDLREVNKRVETIHPTVPNPYTLLSKLSPEHHLYSVLDLKDEFFALPIAKVSQPIFAFEWTDPGGTYNGQLTWTRLPQGFKNSPTLFNDALQRDLIPYRESHPDVTLLQYVDDLLLAADSFESCAKATEDLLRKLNALGYKVSAKKAQICLDSVTYLGYRLYEGKRSLGPERIQAILNIPKPTTKRQIREFLGSAGYCRLWIPGFAEMAKPLHTATRGEGAEMVWGEQEDRAFEQIKHALTQAPALALPDITKPFQLFAHEVRGIAKGVLTQTLGPWKRPVAYLSKRLDSIAAGWPGCLRAVAATAILVKEASKLTLGQDLQVIGPHAVASLLHSPPDRWISNARIIQYQVLLLDPPHITFLRTEALNPATLLPDDNSEAPLHNCLETVSNLTGLREDLRDQPLPKVDIELFTDGSSFIKNGIRYAGAAVVTQDQVIWAQALERNTSAQKAELIALAQALTWAKGKTVNIFTDSRYAFATAHVHGALYKERGLLTSEGKEIKNKREILALLKALWLPKKVAIVHCKSHQKTNSPQARGNAFADATAKATAEGEVLPIEILP

SEQ ID NO: 431 - protein, 673 aa, synthetic construct
  source 1..673: note = MG151-103 reverse transcriptase
TMPASEEYRLYEDTRQANDLGLLEIWKQEIPKFWAETNPPGLAKHVTPILVQLTSSATPARMRQYPMSREAQQGIRIHIQRLKKAGILVPCKSAWNTPLLPVRKPGTNDYRPVQDLREVNKRVETVHPTVPNPYTLLSLLPPERTWYSILDLKDAFFSIPLAPQSQPIFAFEWTDPEEGETGQLTWTRLPQGFKNSPTLFDEALSKDLSSFRGKHPGCSLLQYVDDLLIAASSQRDCEEATHDLLKVLGALGYRVSAKKAQLCAQEVTYLGYQIKEGQRALSQARIQTVLKIPTPSTKRQVREFLGAVGYCRLWIPGFTELAKPLYVATGGSDASLKWTEMEEKAFQALKTALVSAPALSLPDLNKPFQLFVAESVGVAKGVLTQTLGPWKKPVAYLSKRLDPVAAGWPGCLRTVAAAALLVKEATKLTFGQTLEIVTSHNLASLLYSPPDRWMTNARITHYQVLLLDPPRVTFKQTAALNPATLLPNPEDEATHDCGEILEALTSLRADLTDVPLPDALVTLYTDGSSFVKDGVRYVGAAVVTNQEVLWAASLPQGTSAQKAELIALTQALKWGAGKKINVYTDSRYAFATVHVHGALYQERGLLTAGGQAIKHAPEILALLAAIWEPEKVAVIHCKGQQRDDSDVAQGNRFADDIARKAAKRLVGTQAQLI

SEQ ID NO: 432 - protein, 672 aa, synthetic construct
  source 1..672: note = MG151-104 reverse transcriptase
TLTLEDEYRLHQQPQSPDKNIKDWVQRFPDAWAETGGIGLAKHRPALYIETKPGVNPVRVKQYPMTREARTGITPHIRRLLNQGILRPCRSAWNTPLLPIRKPNSNEYCPVQDLREVNKRVADIHPTVPNPYTLLSALPPYRQWYTVLDLKDAFFSLSLAPKSQELFAFEWTDIDMGINGQLTWTRLPQGFKNSPTLFDEALHEDLGEFRKNHPNLTLLQYVDDLLVAAENWDECIRGTENLLQTLGNLGYRASAKKAQICRPEVTYLGYLLKGGKRWLTQARKETVLRIPKPQSPRQVREFLGSAGFCRLWIPGFAELAKPLYEATKDKQPFNWTIEADKAFQQIKDALLSAPALGLPDVIKPFFLYIDESKGIAKGVLTQYLGPWRRPVAYLSKKLDPVAAGWPPCLRMIAATALMVKDADKLTMGQELHVITPHAIEGILRQPPDRWLSNARLTHYQSLLLNPPRIIFQAPSALNPATLLPDPDLDTPIHDCSEVLAQVHGLREDLQDHPLLDADAVQFTDGSSFLHQGQRYAGAAVVTETEVIWAEPLPIGTSAQKAELIAMTKALTMGEGKKLTVYTDSRYAFATAHIHGAIYRERGMLTAEGKSIKNKEEIVSLIDALWLPKKLAIVHCPGHQKPTDPVSRGNCLADKMAREIALQRDLIMVAQLP

SEQ ID NO: 433 - protein, 680 aa, synthetic construct
  source 1..680: note = MG151-105 reverse transcriptase
SLSLADEHRLFESQQEPGGDMTHWVKRFPTAWAETAGTGLAKHLPPVVIQLKASALPIRVKQYPMPEEARRGIAPHIHRLIKEGVLRPCQSAWNTPLLPVRKPGSGDYRSVQDLRKVNERTEDIHPTVPNPYTLLSHLPPSQVWYTTLDLKDAFFSIPLSEISQPLFAFEWQEDGGQSGQLTWTRLPQGFKNSPTLFNEALSQDLEPFRRSHPRVTLLQYVDDLLLAAETREECIKATEHLLTELGELGYRASAKKTHICKRSVTYLGYRIADGARWLTDAMKQTILAIPSPTSTRGVREFLGSAGFCRLWIPGFAEIARPLYEATKEAPDWSWGEREQQAFDQLKDALLQAPALALPDPTRPFTLFVDEKKGVAKGVLTQQLGPWKRPVAYFSKKLDAVAAGWPPCLRIIAAIAVLVREADKLTFGQALWVTAPHPVEGILKQPPGKWMTNARLTHYQGLLLDSPRITFTDPVILNPATLLPNPELQTPVHNCKEFLSEVTQVRADLKDTPLSGCKLNWYTDGSSFFQDGARRAGAAVVDQEGNTVWSSALPPGTSAQKAELIALAEALERAKGKRVNIYTDSRYAFGTIHVHGAIYRERGFRTAEGKHLKNLAEVQRLLMAVEKPKAVAVMYVPGHQSAKTPEAVGNNRADQEAKRVAMVSPPMETGQPSTVAAIDVP

SEQ ID NO: 434 - protein, 623 aa, synthetic construct
  source 1..623: note = MG151-106 reverse transcriptase
QRCISIRAIQTILRGHAKHEPICLPKPRRITNVKQYRLPGGQDEITKTVQELERVGIIRPAHSPYNSPIWPVRKPDGTWRMTVDYRELNKVTPPVHAAVPNIASLMDTLSREIKTYHCVLDLANAFFSIPISEESQDQFAFTWEGRQWTFQVLPQGYVHSPTFCHNLVARDLAKWEKPNNVNLYHYIDDLLLTSDSLEAVRQAADLLIAYLQKRGWAINPQKVQGPGLSVKFLGVIWSGKTKVLPSAVVDKVQAFPVPTTSKQLQECLGILGYWRSFIPHLAQLLRPLYKLTKKGQSWNWGKIEQDAFQQAKLAVKQAQALGIFDPTLPAELDVHVTQDGFGWGLWQRQSSVRTPIGFWSQVWHGAEERYSMIEKQLLAAYSALQAVEPITQTAEVIVKTSLPIQGWVRDLTHLPKTGVAQAQTVARWVAYLSQRSSLSSSPLKEELQKILGPVTYHSDTSKEPMVAPPEKSPVQEGRYPIPEDAWYTDGSSRGNPSKWRAIAYHPSTETIWFDEGDGQSSQWAELRAVWMVITKEPGDGVLNICTDSWAVYRGLTLWITQWATQEWTIHARPIWGKDMWVDIWNTVKHRTVCVYHVSGHQPLQSPGNDEADTLARIRWIENS

SEQ ID NO: 435 - protein, 575 aa, synthetic construct
  source 1..575: note = MG151-107 reverse transcriptase
NSKPLEVPTALPLKWLTEKPIWIKQWPLAEDKLQALEQLVQEQRDANHIEESTSPWNSPVFVVKKKSGKWRMVTDLRAVNKVIQPMGPLQSGLPLPSLLPKRWPLIIMDLKECFFTIPLQEKDREKFAFTVPTYNNSQPSRSYQWTVLPQGMLNSPILCQYFVNKSLEIIRKQFPKSIIYHYMDDILLSDSNKDTLESMFEEVKKVLPRWGLQIAPEKIQREDSINYLGYRIGLEKIRTQKAQIRRDRLRTLNDFQRLLGDISSLRPAVGITPDLIVHLNKTLDGDKDLNSPRKLTVEAEKELTMIEEKLQEAHVDRVNPNLSSILVILPSRISPTGILMQREDIILEWIFIPHKPSKKLKTYVEKVSELIIKGKLRLRQLAGIDPAEIIVPFTTEEIRKLWEDNEPWQRACANFLGEISSNYPKSDRLNLIKRTSWILPRIVRDAPITGARTFYTDANKSGKAGYKSEELSKVEQSPYNSVQKAELYAILMVLRDFKEPLNIVTDSQYAERVILHIETAEFIPDDTELTSLFIEVQDIIRNRLCPMYITHIRSHTGLPGPLAQGNAEIDQLLIG

SEQ ID NO: 436 - protein, 618 aa, synthetic construct
  source 1..618: note = MG151-108 reverse transcriptase
NKARLKEILEKGQYSQFKNDVGTIKGIKPYEIPGINPGKEKQYPLGPGEEQIKIIVKELEEIGVIEQTKDPVCLTPIQGVLKPGTTDKYRLVHNLKALNKRTTTDQRTLIHARKTLINLPNHKFKTTIDLSNGFWSIPLSEDSKYLTGFQIQGKTYQWTRLPQGFANSPNVFQSVMEEILDDLDVTVYIDDIYFSDETEEAHLTKLEAVLTRLRERGLKIGLKKCTFGAFDVQYLGFEITEKGRQIKAGFCEDLTIPDTALQAEKLLGELEFVSGQVPGYAERAQPCHGVKKGLRQMIGRKTRTFDRPLTSEEQEAFRILIDHVTQSALVLEPRVPKTDIYVKIDLGEQGYTAYCYNESGKTPCAVRSYAYKGAEKSYTEVEKVLLSCFNSLAFLKSTCEPDNIIFITPLHDGIREIRKDTVEVKKAQVSRYSKWLLMQTDPKIHFQGNNKPLKVKTGNDTRATPKRTIEATYYTDGSKTDTDLRAHWGWVAHTPEGRKYHMKGETLGSAQTAELTAVVEALIDARSRKWKTIDVVTDSHYVYLGVTEDLAIWERENMHKQNGDKLAHSTLWQLVSRYRAELDLVVRHVRSHTLNTDPDSKGNSEVDELVQMRKMYIP

SEQ ID NO: 437 - protein, 610 aa, synthetic construct
  source 1..610: note = MG151-109 reverse transcriptase
NKKRLQAILEEGSYSQFRNDCGNMLTPPVNIPGASPAPQKQYPLGKAEEGLAETIDELAQLGIIKETEDKRVTISPIQGVQKPDMSWRLVHNLRELNKRTVPDQSYLINPKKAINSLPNLKFKTALDLSNGFWSVPLDEESQLKTGFQFRRKTYVWTRLPQGYTNSPNIFQDKITDLLSGLPVTVYIDDIYWSHDEEEEHLNVLEEVITRLRNAGLKIGLKKCTVAREQAEYLGFKVTDEGRQIPDDYLKGIVLPTTALEAETVLGKLEYVSQHVPEYGIRSKKCHEVKKGLREGVGRKVKTNNRLLTLEEQNDLAALIEYVGRERKTLTSRIPKTDLRVKVTTTPEGYSLAYFNEGGKEPIMYKSKAWTLPEARYGLIEQNLCACFASLAVSRAIMEPDQIIFETDAPALKEMKKDTLESSKAQISRWGKWQAMQLDPKISFVNKGGKVPKTPKPKERGMPSCTLYTDGSKRQGEDKAQWGLYITGPEKPVRKSGQIYGSARDAEVCAVLEGLIWVRDRKYKVIDIVTDSDYVYRALREDLPIWEKNQMMKQNGRPLQQQNMWILISQKRDGLDIEVRHVNSHTDGSTADHIGNREADMIAQSRAVICP

SEQ ID NO: 438 - protein, 622 aa, synthetic construct
  source 1..622: note = MG151-110 reverse transcriptase
IERIVKESELSEKGELEKLLRKHMDSYAKSKNDCGKVQTKYEHVIQGGIPPPQRQYKINSAAEKEIGETIKELTEQGILRKLPKEELAACNSPLQAVRKPDGSWRLVTNYKALNKVTIPDTRYLINCGEVSGNIGREKNWLSKIDLANGFWSIPLAKESQLRTAFTFGTDHYVWKRLPQGYRNSPNVFQALILEILAGIPVTVYIDDILISTKDEEEHLKILEQTLDRLTEAGLKPSLKKMEIGKHEIDFLGFKLGKDTKALTTSTRVKLEEMQQAGPPKNRKQLQSLLGTLNYIRELIPKYSREAKILYQGTKEGKWQWTDQMEQARLKLISMALESGALERRDETLPLYVQVSEEEEEVTLTLWNAEGICPIAFLTHQQEPTMKRFDENSAERILAAVCKRLLQLKAVAKEQPIVIFSMAGELARLKRNLVMNQARINSHRWDQWSLILGDNQLDWRRIKQKRKDKITRYHENHKHLPKYFTDGSERGGKVKWGYLVKFNGQLITSQKEEIQGTAQLAEVMAVERALQRAVELGHTEIVLTCDSEYVTDGINLELDKWKANDFHTAKGKPMAHRDQWKNIANLLEKVKAHVYHQVSHTQQTNESAEGNRQVDKLIGRVKT

SEQ ID NO: 439 - protein, 628 aa, synthetic construct
  source 1..628: note = MG151-111 reverse transcriptase
IRSLRIEPVLVGKLHMTPIEVPKPTKVISCKQYRIPGGHKEIAETIQDYLRAGVLVTTTTQWNNPIWPVKKSDGSWRMTVDYRELNKVTPPLMAAVPDTVTLIERIQTFQGTWYAVSDLANAFFTIPIAPQFWDQFAFMWQGRQYTFTRLPQGYKHSPTICHRIVAEHLDDIVIPEKIQITHYIDDILVQGFSEAEVQKVLEILIEKLKIKGWEINPSKIQGPSQSVKFLGIYWNQGHRQIAPEAKRAILDFAAPKSKKEAQKFIGLFGYWRAHIPHLGQILQPLYKVTKKKYEFEWGKEQSTAFEEAKIAIQTALDLWPMREGPVELQVTIEDMYASWSLWQKQEGKRVPLGFWSRKLPSAGVTYTPFERQLLAAYWALVETEQLTLGHDILLRPGIPIMQWVLSDPVSHKIGHAQESSIIKWKWYIQNRAKAGPTGIMRLHELVFQSPVDPIDSFSVEQLPKENSPVIWNTGYDDLTQEQKQHAWFTDGAAKYIGQDRYWKAISFNPTTGMILETTGKGKSSQFAELQAVYQAIMYEKGKQCHIFTDSWAVANGLATWLPMWRHNNWRIHDKLLWGNELWKEIWESLSCTNVSVFHVDAHAQVNSKEREYNAKADSLATIAAASLP

SEQ ID NO: 440 - protein, 646 aa, synthetic construct
  source 1..646: note = MG151-112 reverse transcriptase
SLPLVEQNVNPRVWADGKSVGRAQNAIPVVVKLKDPHVFPHKKQYPLKPEVKEGLKPIIENLKEQGLLIPCNSPCNTPILGIKKSNGKWRLVQDLRIINEAVVPLHPVVPNPYTLLSEIPERAKYFSVIDLKDAFYSVPLAEESQFLFAFEDPTQPASQLTWTVLPQGFRDSPHLFGQSLSRDLQNFNSSEAVVLQYVDDILLCAETEEACLRASEDFLNFLAGCGYKASREKAQLCQQSVRYLGLIISEGTRAIGPERIKPILNHPLPMTLRQLRGFWGITGYCRIWILGYGELAWPLYKLIAETQQAQTDKLVWSPETQKAFKVLQTALLQAPALSLPTGSEFNLFVTERKGVALGVLTQPRGPHQQPIAYLSRELDVVSRGWPHCLRVIGAAALLAPEALKIINGRNLTVLTSHDVSGILNSKVNIWMTDSRLLKYQSLLLEGPVTKLKVCGNLNPATFLPEKENETPDHDCSQFLTLNYAAREDLKDTPLDNPDMEIFTDASFFVCEGKCKAGYAVVMAEQVLEAKSLPQETSAQLAELVALTRALELSKGQRVNIYTDSKYAYLTLHAHAAIWKERHFKTATGEPIKHFREIERLLTPIYCPKEVAVMHCKGHSRDGSKIAEGNHLADCQARKAALYETPS

SEQ ID NO: 441 - protein, 621 aa, synthetic construct
  source 1..621: note = MG151-113 reverse transcriptase
ITKFITNLAAVEIPPVILPAPTQASFTPQYPLKGGHQDITKAIQKLLDEDIIELGRSHIYNSPVWPVKKPNGTYRITIDYRNINKVSPVVEGILPNASEVINIIQGDAPRYMAAIDLSDMFFAIPIDKQSRQITTFAWQGKQFQFKRLPQGYKNSPTIAHNILATYIDPKQYKSKIIQYIDDILLYNNDIDTLQEDLDKLIRHLRQHGWTINPEKIQKPDTKVTFLGIHWDSEGRSVPNKVINKPDSLKSPTSKREAQQLMGLFMFWKQHIPYMADIAKPIYKVTRKAVDFEWNEEQEEAFQQLKHYIHLFSQLQNIQSGDKIVLDIAFISEHGNWGLYKKGQEDSRLMPVGFWSKKFPYSYFKYSFFEKLIWTLYAALLHTEPLTGQQPITVRSTLPLKAWLSFEAEDLAGSQIDEKVLAWKWYINTRSTSGAGGLALLTEEVNKLEVEPPTCANKFVPIEPIGVQGPKYSPVLKNAWFTDGSASVSGDRTIWKAAAFCPATQRALTATGESNSAQHAELIATYIAVKEAVDTQKHKIYIFTDSWAVCNGIILWSGKWKQTNWQINGKDLWSKEYWKKLDDLSSQIKIYATLVNAHATDSSKTTLYNKITDQLAKGLTPE

SEQ ID NO: 442 - protein, 648 aa, synthetic construct
  source 1..648: note = MG151-114 reverse transcriptase
EIDTRIMDQVYPGVWAIDVPGRAKNASPVIVKLKEGQGAIRIKQYPLKREDREGIRPNIERFIELKLLKECESEFNTPILPVKKPDGSYRIVQDLRAINKITEDLCPVVANPYYTLLTTLTPDLAWFTVLDLKDAFFCLPLHEASQRIFAFEWENPRSGRKTQLTWTVLPQGFKNSPTIFGNQLAKDLELWEPPSGEGKVLQYVDDLLIATRTEESCIIWTVSLLNFLGLQGYRVSKKKAQVVLQQVTYLGYEISAGQRVLGKARKEAICQAPRPRTVKELQTFLGMTGWCRLWICNYGLLVKPLYSLIAANQKDLQWDAESDRAFHELKKALMSAPALGLPDVSKPFFLFSHEKQGMALGILAQDLGPYRRAVAYFSKQLDATAKGWPGCLRAVAAVILNIQEARKFTLGQKMTVLVSHTGSAVLETKGGHWLSPQRFLKYQAIMVEQDDVEIVTTNIVNPASFLNGNVGESVDHDCLETIEATYSSRTDLKDVPINGAEHWFTDGSSYMLNGKRHSGYAVTTSEEVIESGPLPADTSAQKAEIITLTRALERAQGKPINIWTDSKYAFGVVHAHGAIWKERGLLNSQGKIIKHAEEILKLLNAVQLPERVAIMHIKAHQKVSTELERGNELADREAKQAARKAIKV

SEQ ID NO: 443 - protein, 571 aa, synthetic construct
  source 1..571: note = MG151-115 reverse transcriptase
MSIAPSFALPLKWLTKQPIWVEQWPLTKEKLSALEKIIQQLLKEDRIETSVSPWNSPIFVIKKKSGKWRLITDLRKINTVIQPMGALQPGLPQPSMIPKNWFLTIIDLKDCFFTIPLQPQDREKFAFTIPSLNNNKPTSRYQWKVLPQGMLNSPTLCQFYVNQPLERLRSLFPSALVIHYMDDVLFAHYDKIKLKQLVTKAESVLGEYGLIIAKEKIQEQPPFEYLGNKLDQTRIWPQKVELRRDCLHTLNDFQKLLGDINWLRPSLGIPTYALKNLFLTLQGDPALDSPRSLSTLAEKELLQIEQIMQTAYLDRIDPNEPVVLVVFPSQHSPTGIFWQKDLILEWLFLPNKEQERLSTYLDKICKIIAKGRLRLRHLIGTDPQQIIVPLTQQEILCQYKLSNEWQLALQDFLGDIHNNFPKNKRLQFLKKTQWILPSIVKTKPIPKADTFFTDANKLGMAGYTGPKTRVEQTPFRSVQKAELAAIIMLLQDYSDPLNLVTDSQYAEHTVKEIETATLIADGSEIVQLFSILQLLIRNRSQPIFITHIRAHTALPGPMSAGNEQIDRLLIG

SEQ ID NO: 444 - protein, 647 aa, synthetic construct
  source 1..647: note = MG151-116 reverse transcriptase
SHPRISHPVNPSVWDTDNPSIAQCPPVSIQLRDPTKFIHQPQYPLTTSTLLGLSPIISDLLHKGYLRPTQSPYNTPILGIKKPNGSYRLVQDLRSINAAVIPIHPLVPNPYTLLSLIPASSTHFSVLDLKDAFFSVPLDPSSQDLFAFTWTDPHTRHSEQLTWTVLPQGFRDSPHLFGQTLSHDLKNFYPTCPLSTLLQYVDDLLLCNPSWDISQRDTAALLNFLAQHGYKVTPSKAQISASQVTYLGFLLTPQHKSITTDRKQALSSWPVPKTKAEILSFLGLAGYFRAWIPNFSLLAKPLYNLSKGDPNEPLPSSPKTPFNNLRLKLLSAPALHLPDLTRSFLLYVHENQGQALGVLGQMQGPTFAPVAYLSKQLDPTVRGWAPCLRVLAAAQKLQQETFKLTFGAPLTICSPHHLKDLLAYKSLHTLPPSRVLALITSFLENPSISFQSCSPLNPATLLPVHPTPEPPLHNCLETLQSLTHSPSTIVEGPLPHADHNWFTDGSSYRSPTAPKAGYAIVSLTATIEAQPLPLGTTNQQAELIAATRACILAEGKTLNLYTDSKYVFHTLLSHSAIWKERGFMTTRGNTITNSDLIHKLLQASQLPTRLGIIHRKAHKKDNSPSTQGNRLADAAAKNAAFSKSSET

SEQ ID NO: 445 - protein, 613 aa, synthetic construct
  source 1..613: note = MG151-117 reverse transcriptase
GSPTASIRLLQQAPALPPSKTVNVKPYALPLGAREGITPVIAELREQGIIVPTHSPYNSPVWPVRKPNGKWRLTIDYRRLNANTGPLTAAVPNIAELIATIQEQAHQILATIDVKDMFFMVPIQEADRDRFAFTWEGVQFTFTRLPQGYCHSPTIAHYALAQELAQIPPREGVRIYQYIDDVLIGGSDAAAVGQTQTEIITHLENLGLQIPAEKVQLPSSEVKFLGIWWRGGTVCIPPETLTTLEEVKSPENKKELQHALGLLVFWRKHIPDFSIIARPLYDLTRKRATWDWTPVHEEALKLLIFEAGVYQALGPIHPTDPFQIEWGFAIHGLSIHMWQRGPEGTTRPIGFHSRSFKDAEKRYSIWEKGLFVVTLALQEAEKIIRQQLIILRGPFKVLKPVLAGTPPPVGVAQRDTVRKWYAQLDHYCHTYQIEEGAPKVLKIQDPPSDHPEPPPSYIKPAPPFETHLKNVWFTDASSRREGKVWKYRAVALHVDSGDRIITEGEGSAQVGELTAVWSVIVKEAETTEPVFIYTDSYAVFKGCTEWLTFWEQNHWEVNRVPVWQREKWEEILNIAKRKSFLVGWVAAHQSGNHPAHLLNNQVDSMTRLMRTAT

SEQ ID NO: 446 - protein, 426 aa, synthetic construct
  source 1..426: note = MG153-1 reverse transcriptase
MDTSSLMEQILSKENLNAAYLQVVRNKGAAGVDGMNVEELGAYLSENGENIREQLRTRKYKPQPVRRVEIPKPDGGVRNLGVPTVVDRFVQQAVAQVLTPIFEEQFHDHSYGFRPNRCAQQAVLKALEMMNDGHSWIVDIDLAKFFDTVDHDKLMTIFGRTIKDGDVISVVRKFLVSGVMIDDEYEDTIVGTPQGGNISPLLANIMLNELDNELEARGLNFVRYADDLIIMVGSKQAADRVMKSVTRFIEEKLGLKVNAEKSKVDKPKGIKYLGFGFYFDTFAKAYKARPHPKAVTKFKAQMKKLTCRSWGVSNAYKVQKLNQLIRGWINYFKIGNMKRLCQRLDSNIRYRLRMCIWKHWKTPKNRAKNMMKLGLPAWAAWRSAYIHGYARVCRSRDVHRTITSERLKQFGLMSMTDYYTERSVAC

SEQ ID NO: 447 - protein, 427 aa, synthetic construct
  source 1..427: note = MG153-2 reverse transcriptase
MDTSSLMEQILSKDNLNAAYLQVVRNKGAAGVDGMTVEELGAYLSENGESIREQLRTRKYRPQPVRRAEISKPDGGVRKLGVPTVVDRFVQQAVAQVLTPIFEEQFHDHSYGFRPNRCAQQAVLKALEMMNDGHSWIVDIDLAKFFDTVDHDKLMTIFGRTIKDGDVISVVRKFLVSGVMIDDEYEDTIVGTPQGGNISPLLANIMLNELDKELEARGLDFVRYADDLIIMVGSRQAADRVMKSVTRFIEERLGLKVNAEKSKVDKPKGIKYLGFGFYFDSFAKAYKARPHPKAVAKFKAQMKKLTCRSWGVSNSYKVLKLNQLIRGWINYFRIGSMIELCKRLDENIRFRLRMCIWKHWKTPKNRAKLLMLLDVPRWAAYKIAYSGNRYARITHNGWVHKAISNKRLAAFGLISMEDYYAKRRVAC

SEQ ID NO: 448 - protein, 427 aa, synthetic construct
  source 1..427: note = MG153-3 reverse transcriptase
MDTSSLMEQILSKDNLNAAYLQVVRNKGAAGVDGMTVEELGTYLSENGESIREQLRTRKYKPQPVRRVEIPKPDGGIRNLGVPTVVDRFVQQAVAQVLTPIFEEQFHDHSYGFRPNRCAQQAVLKALEMMNDGHDWIVDIDLAKFFDTVDHDKLMTIFGRTIKDGDVISVVRKFLVSGVMIDDEYEDTIVGTPQGGNISPPLANIMLNELDKELEARGLDFVRYADDLIIMVGSRQAADRVMKSVTRFIEERLGLKVNAEKSKVDKPKGIKYLGFGFYFDSFAKAYKARPHQKAVAKFMAQMKKLTCRSWGVSNAYKVQKLNQLIRGWINYFKIGSMKGLCERLDCNIRYRLRMCIWKHWKTPQNRAKYLMQLGIGRKYAWSTAYTGARIAYVCQRGAMNMAITKERLTRFGLVSMADYYAKRRVTC

SEQ ID NO: 449 - protein, 426 aa, synthetic construct
  source 1..426: note = MG153-4 reverse transcriptase
MDTSSLMEQILSKENLNEAYLQVVRNKGAAGVDGMSVEELGPYLSENGENIREQMRTRKYKPQPVRRVEIPKPDGGVRNLGVPTVVDRFVQQAVAQVLSPIFEEQFHDHSYGFRPNRCAQQAVLKALEMMNDGHNWIVDIDLAKFFDTVDHDKLMTIFGRTIKDGDVISLVRKFLVSGVMIDDEYEDTIVGTPQGGNISPLLANIMLNELDKELEARGLDFVRYADDLIIMVGSRQAAERVMKSVTRFIENKLGLKVNAEKSRVDKPKGIKYLGFGFYFDSFAKGYKARPHMKAVEKFKEQMKKLTCRSWGVSNTYKVKKLNQLIRGWINYFKIGSMKNLCRKLDAHIRFRLRMCIWKQWKTPKNREKNLIKLGLPRYAAHGISYAKGYARVCRSWNLHISISKERLAKFGLISMEDYYAERRVTC

SEQ ID NO: 450 - protein, 429 aa, synthetic construct
  source 1..429: note = MG153-5 reverse transcriptase
MDTSSLMEQILSNENLNAAYLQVVRNKGAAGVDGMEYTELQKHLSENGEIIKEQLRTRKYKPQPVRRVEIPKADGGIRKLGVPTVTDRFIQQAIAQVLTPIYEEQFHNHSYGFRPNRCAQQAVMKALEMMNDGHSWIVDIDLERFFDTVDHDKLMTIIGRTIKDGDVISIIRKFLVSGIMVDGEYEDSVIGTPQGGNLSPLLANIMLNELDKEMEARGLDFVRYADDCIIMVGSRQAAERVIRSITRYIEEKLGLKVNASKSKIDKPKGIKYLGFGFYYDSFAKEYRAKPHAKAVEKFKARMKELTCRSWGVDNGYKVKKLNELIRGWINYFKIGSMKGLCEKLDANIRYRLRMCIWKHWKTPQNRAKNLIKLGISRRYAWSTAYSGARIAYVCQRGAMNIAVTKERLTRFGLVSMLDYYVERRSLMLS

SEQ ID NO: 451 - protein, 434 aa, synthetic construct
  source 1..434: note = MG153-6 reverse transcriptase
MELIDWILADQNIDAAIWAVKHNRGAAGIDSMQVDELDEYFKNHREEIKQLIREKKYVPQPVRRVYIPKPDGKQRPLGIPTVVDRVIQEAIAIVLMKGYDRYFSEYSYGFRPNRNCHQAVTKALEYMNSGYEWVVDLDIEKYFDTVNHDKLVSILRERINDDTTLHLIRAFLKAGVMENGLVSPTEQGVPQGGPLSPVLSNVYLDKLDRELENRGLHFCRYADDCTIYVGSEMAANRVMRSIADWLGRKLKLRVNMTKSKVVRPSGSQFLGFRFWKSPREGWKPKPAKERCKRLKDKVRAILCRRKAVAVPLGVTITKLNQLMRGWINYFCLGSMKGFMKEFGEWMRHKVRVVILKQWKKADTIYRNLRKTNRICRCGISDEEIYKVAYSGRGWYKRATHNAVNFILSPQVLSQRTKQRPGLVDPLKYYLARCT

SEQ ID NO: 452 - protein, 463 aa, synthetic construct
  source 1..463: note = MG153-7 reverse transcriptase
MGTENRESCSQRDSAERKGYVRAHRSFNRIWKERDSAEPDILGKILEKDNLNRAYKRVKANKGAPGVDGMTIEATLPWLKEHNHELVERIRKGKYTPSPVRRVEIPKPDGGIRKLGIPTIIDRIIQQAMLQPLLPIYEPLFSDDSFGYRPGRGAKDAIFRIKEYIEQGYTRAVVLDLSKYFDTLNHTILLNLLRRQVKDERVIQMVKRYLKSGVMENGVVAETEEGSPQGGNLSPLLANVYLNEFDWEFHRRGVPCIRYADDIVLLAKSERAAERLLESSAKYLEETLKLKVNREKSRTVSVFAIRNFKFLGFCFGKNGKGIYIRIHGKSWKKAKDKLRQLTSRSRCGSIVRTMEKIKVYMRGWLNYYGIADMKNNMESLNGWLYRRIRMCIWKQWKLPKTRKRKLAGLGVDSHYAATIAYDRKGYWFNAGNKAVNWALSKERLTNWGLYDLATAYQSVHVNY

SEQ ID NO: 453 - protein, 426 aa, synthetic construct
  source 1..426: note = MG153-8 reverse transcriptase
MKLIETILFSENVIKAQSRVLSNKGGAGIDGMHVDELAEYMRANWDGIKESILVRKYNPAPVRRVEIPKVNGGVRKLGIPTVLDRTIQQAIVQVLSPIFENEFQENSYGFRPCRSCEQAILKLLEYLNEGYEWIVDIDLEKFFDNVPQDKLMSYVGRVIRDPDTESLIRKYLKSGVMENGIYEATEEGTPQGGNLSPLLSNIMLNELDKELVNRGLHYVRYADDCVIAVGSEASAKRVMRSVTTWIERELGLKVNASKSHICRPTKLKYLGFGFYRNPQNRQWQSRPHESSVSKFVRSLKRLCKRSWSVSMTDRITRLNYVTRGWINYFSISFMKLKLEKIDEHLRTMLRKVIWKQWKTPQKRAWGLRKLGVDSALARRTSFCGDRYEWVVRRTCVARAISKDVFTRRGLVSCLDYYLIRHSLKTS

SEQ ID NO: 454 - protein, 466 aa, synthetic construct
  source 1..466: note = MG153-9 reverse transcriptase
MESYLTQDRAEPEAGCGANSVSDTEGDGRTVQHDLVEEVVSWSNLEAALKQVVSNRGAPGVDGMTVDELGPWLETNYSELAEKVRNGRYRPNPVRRKEIPKPNGGVRDLGIPTVVDRLLQQAVSQVLMPIYEPSFSDTSYGFRPGRSAHDAIQKAKEYLSEGFGYVVDLDLARFFDTLNQDYLMNILRERVRDKALLELIKRFLRSGVVLPNGLLRETREGSPQGGPLSPLLSNIYLDRFDKLLESRGLRFVRYADDCLVFVRTPRAGERVRESVTRYLEGTLRLRVNQEKTVVGRADQVKFLGFRLYRQKTVGATVHDSSLARFRKEVRRITKRNRGTSLGSVLTELKTFTRGWVGYFRIGLSKSRAEKLDGWIRQRVRQYIFKQWKTLRNRASQLVSLCPDYLRPRPGFTPYSWVRECRRAAFSRSYWKAVNYPVVKRALSNSYLAGLGLYSLSEQLEKWNKGV

SEQ ID NO: 455 - protein, 468 aa, synthetic construct
  source 1..468: note = MG153-10 reverse transcriptase
MKDGMQKTSALANDYPQRNRTESERYGGVQTFMWMTEDNIVEVPFDKEHLLEVILSPDNLNKAYKAVVRNKGCGGIDKMSCEQLLPWLKANKDELIRSLLDGTYRPNPVRRVEIPKDNGKMRLLGIPTVVDRMVQQAINQVLTVIYEPQFSKRSFGFRPRRGCPTALREVQKIVNEGYKYVVDLDLERFFDTVSHSKLIEILSRTLKDGRVVSLIHRYLRSGVIDKGLWHASEEGTPQGGPLSPLLSNIMLNELDKELARRGHPFVRYADDSMIFCKTKRAAERVRESITKFIEGKLFLKVNKEKTAVSYIKGVRYLGYSFYIHKGKCQLTVHPKSKARMKSRLKELTSRSNGWGYEKRKQKLKEYIQGWVGYYHLADMKRLCMETDKWLRRRIRMCIWKAWKKPRTKVANLIKCGIAEWQAYQWGNTRLAYWRIAHSPILLTAISNDRLRKQGYMCLMDLYLEWNPK

SEQ ID NO: 456 - protein, 456 aa, synthetic construct
  source 1..456: note = MG153-11 reverse transcriptase
MSLGRAVHQKPGDTGRSAGRRGEAEPKAMRDEARTARHETASPGREDLLGQALASANLEAAWKRVKSNRGSAGVDGLSIRDTAEHLKMHWPRIRASLLDGSYRSQPVRRVQIRKPDGGMRELGIPTVTDRLIQQALLQVLQPRLDPTFSEHSHGFRPGRRAHDAVLEAQRYVQSGYRVVVDVDLEKFFDRVNHDILMARLARRIDDKAVLRLIRRYLVAGIMDGGVVMERYEGTPQGGPLSPLLANVLLDEVDRELERRGHRFVRYADDCNVYVRSRRAGERVLAGLRRLYERLHLKVNEAKTAVAPSSRRKFLGYAFWYGPGGQAKCRVADKAKETFKQRIREMTRRSGGRSLPDIVERLQTYLPGWKAYFQLAQTPKVFHELDEWIRHRLRAVQLKHWRRGKTMYRELKTMGASETDARQVAANSRRWWRNSRFLLNRAMPIAYFDRLGVPRLS

SEQ ID NO: 457 - protein, 471 aa, synthetic construct
  source 1..471: note = MG153-12 reverse transcriptase
MQVDKVFLMTDNLSSTQCRNETLLGADGIRARVAGPRPKGVSVKATPSWTKADPGWCNIEKVVNSIIIDEALSKVISNRGSGGVDHITTAELRDYWSKYGGTIRQKIVQGTYIPLPVKRVDIPKPNGDKRMLGIPSVIDRVIQQALVNVLEPVFDPQFSEFSYGFRKGRNAQQAVLQAQSYIKDGHRWVVELDLSKFFDRVNHDILMSRVARVVEDKRILKLIRRYLNAGIMEDGIVKPRSEGVPQGGPLSPLMSNIILTELDRELEKRGHKFCRYADDCNIYVKSEEAAKRVLESVTKYLEGGLKLRVNRDKSGTFRPYESVFLGYSFHRRNWTRIVVAEESIKRLKTKLKIIYRHSRGTSLGTAIKKLNQILRGWRTYFKLDTRKGFFEKLDINIRTHLRVLIWRAWKRPRTRERELRKRGLDAFNAWKSANNGRGPWYNARAPHMRIAIPNALFVRLGLYNLSSMGTV

SEQ ID NO: 458 - protein, 429 aa, synthetic construct
  source 1..429: note = MG153-13 reverse transcriptase
MVSLEKILEPSNLTEALKQVVSNKGAPGVDGMAVDELEPFIRNHPGVLSQAIRDGSYRPSPVKRVYIPKDNGEKRPLGIPTVVDRLVQQAIAQKLSEEYEPNFSDNSFGFRPKRCAHDALKRIVDNANDGYEYVIDLDLAKFFDTVNHSKMIQVLSETVKDGRVVSLVHRFFRAKINDEGKIIKPAIGMPQGGPLSPVCANILLNELDQLLDGRGHRYVRYADDMLLQFRSLRAAERVFTSVKRFIEEKLFLKVNVEKTKICHLSKDVKFLGYSFYKSYDKDDLDGKGKWKLVVHGKKRRSFEQTIKTLLDRKCPKGLERCKEDLKLYLCGWTNYFYMGLSRSRRQSYDKWIRRRIRQLYWKIWKKPSTRIRALMQLGIERSKANEWGNSSKAYWRVAGSWILKRSLTNDVLQNLGWIWLGIARKWSPQ

SEQ ID NO: 459 - protein, 471 aa, synthetic construct
  source 1..471: note = MG153-14 reverse transcriptase
METRHGMKYRQLHIEDYLGEIPAEQGRGTGVYAHEWITGNPDTNTDFWTDNLLDAILRSDNLNAAYKRVKSNRGTGGIDRMQVDELLPYLRNHRDELIRQLREGKYKPNPVRRVEIPKEGKDKVRKLGIPTVVDRMIQQAIAQELTAVYEEQFSENSYGFRPGRSAHDALEKCREYVNEGYIYAISMDLQAYFDTVNHSKLIEVLSRTIKDGRVISLIHKYLKAGVMEDGGFHATSEGVPQGGPLSPLCGNVMLNELDKELERRGHKFVRYADDCIVLCKSRKSAERTLKHIIPYITKKLYLKVNLEKTTVSLVSKVKYLGYGFYRNKGKCRMRVHPKSIRKMKNHLRELTVRGNKWSNPEREEKLRRYTTGWINYYRLADMKSLMETTDEWLRHRIRAVYWKQWKKVRTRYKILRTLHLPEWKVHELANCRKGTWRAASTLNSVLTKTVIVDRLGYPSMTAHYLKVRVNY

SEQ ID NO: 460 - protein, 435 aa, synthetic construct
  source 1..435: note = MG153-15 reverse transcriptase
MCEIRKVETDMELLEEVLSKDNLNKAYKQVYKNKGASGVDGVTVDELFSYIQEHKEEILWKIRNRKYKPQPVRRVLIPKDNGKMRKLGIPSVIDRVIQQAIVQVLTPIYEEQFSNHSYGFRPKRSCEMAVVQALEYFNDGYDWIVDIDLQSFFDEVNQDKLIGIIRRTIKDGDLVSLIRKFLQSGVMENGVLQPTKKGTPQGGNLSPLLSNIMLNELDKELEARRLHFVRYADDCLILVKSEKAANRVMESITKFITKKLGLKVNVEKSKIARPDDIKYLGFGFYKKINQNEWRPKPHIKSVQKFKTKLRDILVRSRSISLDDRLLRLKQLIYGWVNYFRIADMTILLRDIDGNIRRKLRVIIWKQWKKIKKRYACLRKLEITHRDAYVTANSRSGYYHISHTRVLEKAISKERLNKRGLVNSLDYYLKVHIITN

SEQ ID NO: 461 - protein, 463 aa, synthetic construct
  source 1..463: note = MG153-16 reverse transcriptase
MSKAMRQMPGQPGRVCVAHGEAVRDLISDEAGGPPREHPDTGSATPPTGPGGLLAAMLTRQNLQLAWKRVKANKGAAGVDGLDIEQTAQTLRTRWPDIRQSLLQGRYRPSPVRKVMIPKPDGTQRELGIPTVTDRLIQQALLQVLQPLIDPTFSEHSYGFRPGRRAHDAVKAARAYVQSGKRVVVDVDLAKFFDRVNHDILIDRLNRRVDDAGVIRLVRAYLNAGIMDGGVVVDRHLGTPQGGPLSPLLANVLLDEVDKALEARGYCFARYADDCNVYVGSKKAGERVMAYPYLRRLYVNLKLQINEAKSAVASAFGRKFLGYALWVAKGREVKCKVAQKPLQNFKARIRQLTRRSGGRSMAQVVDKLRPYLLGWKAYFGMAQTPGVWRGLDEWLRHRLRAIQLRQWKRPKTIHRELKALGASDDVAKQVAGNCHRWWRNSDGVIKRVLAIAYFDRLGVPRLS

SEQ ID NO: 462 - protein, 450 aa, synthetic construct
  source 1..450: note = MG153-17 reverse transcriptase
MQQKTYRDPDAGRRGEAPDAGSQGAETVQAPTTRESPSSTAWLMEAICEPVNLRHALKRVKANKGAAGADGMSVSELPDYLRHHWPELKAQLLSGSYRPSPVRRVTIPKPGGGERLLGIPTVVDRFIQQAMMQVLQAQWDATFSDSSYGFRPGRSAHQAVKQAQKYIESGYSWGVDLDLEKFFDRVNHDVLMSRIAKRVSDKRVLSLIRGYLNAGVMEAGLVMPVTEGTPQGGPLSPLLSNLLLDDFDKELEKRGLKFARYADDCNVYVKSERAGNRMMAGLTHWLNRKLKLKLNAKKSAVALPETRKFLGYSFRRGRKVWCVVSPESVKRFKTRIRELTGRNTGKSLEQLIEPLKRYLTGWKSYYGLNQWQTLMRDLNRWIRRRLRSVLWKQWKTGSKRFKELRRRGVSKDLAAQTVGSCHKQWRISCSPALSIALPNRLFVRLGLPEL

SEQ ID NO: 463 - protein, 469 aa, synthetic construct
  source 1..469: note = MG153-18 reverse transcriptase
MRSQEGRRQQKAPEGAYLWEEMVKPWGTTGGPSPSSAQGGATPRGGQGSGLMEQVVERSNMLAALRRVERNGGAPGVDGIPTERLRDQIRAEWPRIREELLAGTYRPKPVRRVEIPKPGGGKRLLGIPTAVDRLIQQALLQVLTPIFDPQFSEASYGFRPGRRAHDAVRKARQYVEEGYEWAVDLDIEKFFDQVNHDILMARVARKVTDKRVLTLIRRYLQAGVMVNGVVIETGEGTPQGGPLSPLLANILLDDLDKELEKRGHKFVRYADDCNIYVKSKRAGERVMASIRKFLQERLKLKINEQKSAVDRPWKLKFLGFSMHKRKTGEILIRLAPQAIERVKGKIREITARNKPVSMAERIERLNTYLGGWIGYFALAETPSVFEEIEGWMRRRLRMYLWKQWKRVRTRYRELRALGLSEWVVHQFANARKGPWRMAHGPMNRALGNAYWQSQGLMSLTERYQSLRQA

SEQ ID NO: 464 - protein, 459 aa, synthetic construct
  source 1..459: note = MG153-19 reverse transcriptase
MVKPLRLDRRAERSPTPSEGMSEAVGEGVWEQVFERKNLLSALKRVEANGGAPGVDGMTVEALRPYLKAHWLELRAALDSGNYRPSPVRRVEIGKPDGGVRLLGIPTVVDRLIQQAIGQVLTPLFEPVFSPHSYGFRPGRRAQDAVEAAQGYIREGYTWVVDIDLEKFFDRVNHDKLMARVARAVKDKRVLKLIRRYLQSGVMVNGVVMETEEGTPQGGPLSPLLANIMLDDLDKELERRGHRFVRYADDCNIYVRTERAGERVMDSVRGFLEKKLKLKVNEKKSAVARAGQRKFLGFSYFYRKGEVLIRVAEQAQQRLREKLRGLTRRTRSGRLEEIIQQLKEYMRGWMGYFRLADTPSVFAGLDHWLRRRLRQLLWKRWKRGTTRWRELVSLGVPRRLAGLGATGSSPWRMAGTPVVHMALSNAFWDAQGLCSFTEYYHQLHLPRRTAGCGPACPVV

SEQ ID NO: 465 - protein, 456 aa, synthetic construct
  source 1..456: note = MG153-20 reverse transcriptase
MGEVRVKPGGTPRGRSIDRQDLKLILRREKYRMDLMEQMLSRENMLQALRRVEANKGAAGIDSVSTRQLRAHVVQHWETTKAKLLAGTYKPSPVRRVEIPKPDGGVRLLGIPTVMDRLIQQAILQVLTPIFDPTFSPHSYGFRPKRRGHDAVRQAQEYIREGYRYVVDIDLEKFFDRVNHDILMSRVARKVKDKRVLKLIRAYLKAGIMAEGIRVRSEEGTPQGGPLSPLLANILLDDLDKELERRQLRFVRYADDCNIYVKTRRAGERVKRSITKYLEKKLKLKVNEAKSAVDRPWKRKFLGFSFTFHKEARIRIAPKSLKRVKDKIRSLTRGNHLTSMETIIEDLNRYLMGWMGYYALMDTPSTLKALDEWIRRRLRLVLWSRWKRVRTRYRMLRALGLPERDVHKLANTRKGAWRTSKTPQMHKALGIAYWKSQGLMSLTERYFEIRQGWRTA

SEQ ID NO: 466 - protein, 453 aa, synthetic construct
  source 1..453: note = MG153-21 reverse transcriptase
MKETKKCDESRQLNIQTGHLQKDRVELESYAKAPSISVTSDNRQNARRECHYGLLENIISSENLNEAFKRVKKNKGSHGEELRQSIADGSYKPNPVRRVEIPKDNGKIRPLGIPTVVDRVIQQAISQVLTPIFEKKFSENSYGFRPNRSAHQAILKCKEYMDEGYRWAVDIDLEKYFDTVNHDKLIGLIYKEIKDIRVIGLIRKYPNAGVMEKGLTSLTLEGVPQGGNLSPLLSNIMLNELDMELERRGLRFCRYADDCNVYVKSKKSAERVMKSITKFIEKDLKLKVNKEKSKVDRPWKLKYLGYTFYTKKGEMGIRVHQVSIKKLKGKLKSITGRSNAMSMELRAVKLKQLIVGWIGYFKLADMKSTLRELDEWLRRRLRLCYWKQWKKIKTKHDNLVKLGVENWKAWEHANTRKGYWRISNSPILATTLTNKYLREQGFITLSERYSQVR

SEQ ID NO: 467 - protein, 455 aa, synthetic construct
  source 1..455: note = MG153-25 reverse transcriptase
MSMCEALRQMPERSGRVPLADGEAGRASASDEATRPRHETGSTGSALLMAALTRENLQQAWKRVRANKGAAGVDGRDIPETACYLRTAWPVIRDQLLQGTYRPSPVRRVTIPKPDGGERELGIPTVTDRLIQQALLQVLQPLLDPTFSENSFGFRPGRSAQEAVVRAQAYVQSGRRIVVDVDLEKFFDRVNHDILLGRLQKRIGDAGVLRLILAYLNSGIMQNGVVVSRYQGTPQGGPLSPLLANVLLDEVDKELERRSHCFVRYADDANVYVRSQRAGERVMALLRKMYAKLHLTVNEAKSAVASAFGRKFLGFSFWVAPQGEIKCKVAAKPMATYKQRIRQLTRRSGGRSMAEVVENLRPYVLGWKAYFRLSQTPGVWRTLDEWMRHRLRAIQLKHWKRGPTMYRELKALGASETVARRVAGNARSYWRNADRLLKTILTIAYFDRLRVPRLS

SEQ ID NO: 468 - protein, 419 aa, synthetic construct
  source 1..419: note = MG153-26 reverse transcriptase
MMMEQVVSRQNMLAAYQRVVRNHGSAGVDGVTVEDLAEYSRLHWERIRTELLEGRYQPQPVRTVMIPKPGGGERELGIPTVMDRMIQQAVHQVMSPQFDAGFSEASYGFRPGRSAHGAVERAREHMTAGHRWVVDIDLERFFDRVNHDVLIARVSHTVKDKRVLRLIGCYLSAGLMQGGVVSPRSEGTPQGGPLSPLLSNILLDVLDKELERRGHRFVRYADDCNVYVQSRRAGERVMGSLRVWLEKRLRLKINASKSAVDRPWHRKFLGYSVTTQKRPRLKVSAESVKRMKQRLRELLRIGRGRSLRTVIATVAVYLRGWLGYYRKAEVRNVFEDLDQWLRRKLRRIMWKQWKKPKTRYRKLRAYGVAPDQARRSAWNGRGPWFNAGASHMHLAVPTKLLRNWGLPSLLDEHQRLQRL

SEQ ID NO: 469 - protein, 484 aa, synthetic construct
  source 1..484: note = MG153-27 reverse transcriptase
MISMQTVKAEVSERAAETQSTDRKSTKLPLGADVGAATSEQTKSEGHSLMEQVVERSNLWLAYQRVVRNKGAPGVDGLTVGEFKDWLKMHWPSVKKALLEGDYLPRPVRRVDIPKASGGMRTLGVPTVVDRLIQQALHQVLQPLFEPTFSQGSYGFRPRRTAHQAVRRAQSYIREGKRWVVDLDLEKFFDRVNHDVLMARVARQVRDARVLKLIRRFLEAGMMREGLVEPRSEGTPQGGPLSPLLSNILLTDLDRELERRGLAFCRYADDCNIYVGSRVAAERVMGGIRTFLEEVLRLRINPAKSAVARPWERKFLGFSFTAQREARLRIALQSVRRLTERVRELLRAGRGRSLAHTIDTLNPLLRGWISYFQLTQCKGVLEELDGWVRRRLRCVLWRQWKRSRSRARHMRALGLDAARARCSSQNGRGSWWNAGASHLHQALPAAYFKLGAGLAVARATATPVCSLNRRMRNRTSGGVGGRRA

SEQ ID NO: 470 - protein, 467 aa, synthetic construct
  source 1..467: note = MG153-28 reverse transcriptase
MKEGKQKISKDTCQQKDRAEPDGYAGGQTFIWMTENNITNVDNSKYGLLEYILSPQNLNAAFKRVKSNKGSGGIDKMEVESLGDYLICHKESLIQSILDGNYRPNPVRRVDIPKDNGQKRSLGIPTVVDRVVQQAIAQVLSPIYEKQFSPNSYGFRPKRSAHQALIKCKEHITSGYKYAVDMDLEKFFDTVNQSKLIEILSRTVKDGRVVSLIHKYLRAGVVVRNKFEESKMGVPQGGPLSPLLSNIMLNELDEELEKRGHHFVRYADDMLILCKSIRSAKRTKATIIAYIEGRLFLKVNKDKTCVAYISKIKFLGYSFYVNKKKGRLRLHPKSLAKMKEKIRALTSRSNGWGDAKRKLELKQYITGWLNYFKLADIKSLLSRIDEWYRRRLRMVIWKQWKRVRSRGRNLIKLGIAKYKAWEYANTRKAYWRTSNSPILNTSITNERLKQAGYIFFADYYRKVNGVN

SEQ ID NO: 471 - protein, 465 aa, synthetic construct
  source 1..465: note = MG153-29 reverse transcriptase
MKGRMQKISKDTWLQKDRAEPDSYAAGQTFMRITENNLTDVTTLEDGLLEQILSPSNLNRAYKKVRSNKGKGGVDKMGIEHLQDYLVENRVELLQSIRDGKYRPKPVRRVTIPKENGKKRLLGLPTVVDKVIQQAITQVLSPIYEKQFSAYSYGFRPGRNAHQALKKCRDYISDGHIYAVDMDLQEFFDKVSHSRLVEILSRTIKDGRVISLIHKYLRAGVMIGNKFEETELGVPQGGPLSPLLSNIMLNELDKELQRRGHRFVRYADDLMIVCKSKRSAGRTLRNIIPFIEDKLFLKVNREKTNVSHVSKIKFLGHTFYRSHGKGRFRAHPTSIRKMKQRLKQLTSRSNGWGEDQRKESLNHYVRGWVNYFKMADMKSLLRKIDRWYRRRLRMCIWKQWKRIRTKGKMLIKLGLNKWKAWEYADTRKSHWHIANSFILTRTITTHRLRQAGYPFLLDYYSKVRT

SEQ ID NO: 472 - protein, 470 aa, synthetic construct
  source 1..470: note = MG153-30 reverse transcriptase
MRGVKPTMEKKLTKMKVSNQSGYTGFSIFSLGEICLEEVTDGYNLEKALKCVARNKGAPGMDGVETKDYALHRQIAGFKDLIDDISAGTYRPKPVKRVYIPKENGDKRPLGIPTVEDRVVQQALANILSKYYEEEFSDNSFGYRPGRGCRQAVKRALKYVNGGRQWVIDLDLSKFFDTVNHSKLLQILSEKIKDGRVISLIHKFLRTPIYENGVVSPKSKQGTPQGGPVSTILANIILNECDQMMDKENIKFVRYADDMMIFCKSKEAAERTLNKVTKFLEKTLFLTVNKEKTKILWYTHGTQFLGFTLSQYVPKHIKKIAPKCKVYVKVHPKKREKFQKGIKETLDRRAPGGIEETKKKFNQKIRGWFNYFKGSIPQKWMEETDAWMRRRIRQMYWKQWKTPQNRMENFSKLNPKSPSRRDYAYSNNSYWRMARTKQMHNALSNRTLTSMGWLSLQELNAQYLQEMSGN

SEQ ID NO: 473 - protein, 424 aa, synthetic construct
  source 1..424: note = MG153-31 reverse transcriptase
MELLEQILSNSNLNEAYKKVYRNKGASGVDGVTINELKEYLQNNKHKLLSEIRARKYKPQPVKRVEIPKASGGVRKLGIPTVVDRVIQQAINQVLTPIYEEQFSESSYGFRPRRSAQGAVLRSLELINDGYDWVVDIDLERFFDTVHHDRLMNIISRTIEDGDVISLIRKFLVSGVMIDNKYEDTIIGTPQGGNLSPLLSNIMLNELDKELEIRGLDFVRYADDCIILVSSKKSANRVMASVTNFIEKKLGLKVNVTKSKVDRPNNIKFLGYGYYYDGKEGKYQLRPHEKSIQKFKRTLKRLTKRSWSVSLNYRLFKIRQVIMGWIQYFKYGKMKSKLKVIDSKLRARIRIVIWKQWKVPKKQINSLMKLGISLDEAKGITYCRKGYQFIGHSKVIQKAINNSRLKKRGLTSALDHYLKVQTVI

SEQ ID NO: 474 - protein, 424 aa, synthetic construct
  source 1..424: note = MG153-32 reverse transcriptase
MELLTQILSNSNLNEAYKKVYRNQGASGVDGVTINELKEHLRENKHKLLSEIRTRKYKPQPVKRVEIPKANGGIRKLGIPTVVDRVIQQAINQVLTPIYEEQFSDSSYGFRPLRSAQGAVLRSLELINDGYDWVVDIDLERFFDTVHHDRLMNIISRTIKDGDVISLIRKFLVSGVMIDNKYEDTIIGTPQGGNLSPLLSNIMLNELDKQLEIRGLHFVRYADDCIILVKSKKSAERVMTSVTNFIEKKLGLKVNATKSKVDRPNNIKFLGYGYYSDFKEGKYQLKPHEKSIQKFKRKLKRLTKRSWSVSLDYRLLKIRQVIMGWIQYFKYGKMKTKLRGIDSKLRARIRVVIWKQWKVPKKHISSLIKLGILKDQAKGITYCRKGYQFIGHSCVIHRAISNSRLKKRGLTSALDHYLKVQTVI

SEQ ID NO: 475 - protein, 423 aa, synthetic construct
  source 1..423: note = MG153-33 reverse transcriptase
MELLDKILERENLNKAYKHVKANKGAPGVDGVTVDEAYENIRQNKEKWLHQIRKRTYKPQPVRRVQIPKENGKMRNLGIPTVFDRIIQQAMVQVLSPIFEEQFSETSYGFRPGRCCENAVVKALEYLNDGYEWIVDIDLERFFDTVDQDRLINIIMRTIKDGDVVSLIRKYLSAGVMDKGVTKATEKGTPQGGNLSPLLSNIMLNELDKELEARGLRFVRYADDCIILVKSEKAANRVLESITKYIEKKLGLKVNAEKSKVTRPTKTKYLGYSFWKDTKGKWKPKPHLKSYQKIKRKLKQLTCRRISISLDERIKQINYAIRGWVNYFRIANMKNAIQEIDEHLRTRVRVIIWKQWKKASRKEKALLQLGVKPDIAHNLANTSKGYQLVAKTDWLKFAINIERLRKRGLIFLSDQYQKVHVEI

SEQ ID NO: 476 - protein, 463 aa, synthetic construct
  source 1..463: note = MG153-34 reverse transcriptase
MNAENLIDESCPQRTSAEHEKYAGAQSAAPRESEAEDRADLLERILDRDNMNEAFKRVRANKGAPGIDGMTVEAALPWLIEHGKELIDSLRDGTYKPQPVRRKEIPKPDGGIRKLGIPTVIDRMIQQAITQQLTPIYEPIFSDNSYGYRPHRNAQMAIRKAKEYADEGYTVAVEIDLTKYFDTLNHDLLMNTVREEVKDKRVLELIKKYLKSGVMANGLLIKTEEGSPQGGPLSPLLANIYLNKYDHEMTRRGVKEIRYADDIVLFAKSKRAGERLLESSRRYLEKKLKLKLNSEKSKVVSTYSPRKFKFLGYALGKSRQGTFIRIHAKALKKAKEKLKELTSRSQGRKICEVFARLKRFVNGWINYFGIARIKKTLEDWDGWLRRRIRMYIWKQWKKTRRRKENLMKLGVPEWRACEAAYSRKAYWRSAKHASVHSALTNERLARAGYYSLSERYESLHLYD

SEQ ID NO: 477 - protein, 459 aa, synthetic construct
  source 1..459: note = MG153-35 reverse transcriptase
MVRSRKERMREEDKSRPNTRLCEQLISLANIQQAVKKVMQNKGSAGIDGMEVTELPSYLEANWALIREQIVTRTYKPKPVLRREIPKDNGGMRLLGIPTAVDRVIQQALVQVLTPVFEPTFSDFSYGFRPGRSAEDAVRLAQTYMSEGYKHVVDLDLSKFFDTVDHDILMGLIDKHMDDKDVRRLIYVYLKSGVMTNGSMAVTALGTPQGGPLSPLLSNVYLTPYDRELEKRGLRFVRYADDCNIFTKSKMSSYRVRDSAKSYLERKLKLKVNMEKTEARRAVGSTFLGFTFRTYGKRGKLGMTVPHEKKLKKLEDRIRLVTKRNRGVSIGMVIRDLNSILRGWVGYFARSAIKNYLERLMEWIRRRIRQYLWKQWKSGKNRKHRLRQLGVDEWKLKKWKLGSNSYWKMAGTMNYLIDKESIHGRYGLVDILGYYNKLHAQRMESDGIVLDVRYNSLFG

SEQ ID NO: 478 - protein, 434 aa, synthetic construct
  source 1..434: note = MG153-36 reverse transcriptase
MELIEVILSKENLNRAYKKVVANKGASGVDGVGVEELGDYIRENKDVIITSIRNRTYMPKPVRRVYIPKENGKQRPLGIPTVLDRTIQQAIAQPIWDIYEEIFSEYSYGFRPGRSCHDAIRQALYYLNDGYEWVVDIDIEQFFDKVNHDKLIQILGEQVNDSTTLNLIRKYLKAGVMEKGLEKATITGVPQGGPLSVVCSNIYLDKLDKELEKRGLRFTRYADDVLIFTKSEMAANRVMKSIRSWLERKLFLKVNGTKTKVVRPTRSKYLGFTFVKNSTEWKVRPTNEKKKKLKKKLSEYLKRGKAVARPLAVTIKRVNEIVRGWINYFRIGMMKQFMQELGEWLRHKIRVIVVKQWKRPKTIYRNLSYLNWKYKIGCKQEEIFKVANSRLGWYRRCGMSVVNFIISKDLLENRIKDGVGLLNPLSYYLVKVGI

SEQ ID NO: 479 - protein, 472 aa, synthetic construct
  source 1..472: note = MG153-37 reverse transcriptase
MDAERQQGRAYQLTFNFEGDAETLRHDQGGDDGIGTARPEEPQTSTASDPARALTERLMEEVTRPENLNRAYRKVKANKGAPGVDGMTIGDLRAWIAMHKEELIASLLDGSYRPQPVRGVQIPKPGGGVRQLGIPTVVDRLVQQAILQVLEPLLDPTFSPSSFGFRPGRGAHDALKQARQYVADGRVIVVDVDLEKFFDRVNHDILMARLARKVADRRLLGIIRRFLQAGLMQEGVCVARHEGTPQGGPLSPLLANLLLDDLDKELERRGHHFCRYADDCNIYVQSKAAGQRVLGSVTRFLEVVLRLRVNRDKSEVAYIEERKFLGYRLLSGGRLGIAPKSLERAKDRIRQITRRNRGVSVDRMTSELNSFLTGWVSYFRHAACKSHLTELDGWIRRKLRCVRLKHCKRSKTLADFLGSHGVAQHTAWVTALSGKGWWRLSGSPAAHQAMDQRWFASLGLINLAHRHTTLNR

SEQ ID NO: 480 - protein, 490 aa, synthetic construct
  source 1..490: note = MG153-38 reverse transcriptase
MSKAEYRQLTFAFADSPQGAGPAALTDVSVGKAWLALTAEVKEGNDSAAWTADTGRLLESATSAPNLAQALLNVARNKGAAGVDGRSVDEVVAAGPRLLPYLRRELLAGTYRPGDIRRVWIPKPGGGQRGLGIPNVVDRWVQQAVLQVLQPIFEPTFHASSHGFRPGRGAQTAIDEAKKYLAEGFCFTVDIDLSKFFDRVHHQRLLNRLAQQASDGRILKLVHRMLKAKVVLPDGTRITTEEGAPQGGPLSPILSNIVLDELDRELARRGLRFVRYADDFSVFVRSERAGRRVMDSIRKFIEGRLRLEVNEEKSSVSRPNDLTFLGFHLGKSPDGKVTVTPSQRTKERMDLRIRELTPRTWGQSVAACIEKANSYLRGWFGYFRLCTEEGVLSFGRFDAHIRRRIRAVIVHQKKRPRHLYRHLLDRGVSCGMAAKAAFQRRGLWHRSISFGMHKAYPNAWFADRLMSLKEEWQRLHPPEQVSYKQLLLFE

SEQ ID NO: 481 - protein, 471 aa, synthetic construct
  source 1..471: note = MG153-39 reverse transcriptase
MGAGVPEKKIEISEVDLHGGSRKLPRGRISGANFPGTEGQPDPRKPDLIEMMLERGNLLEALHRVESNRGAAGVDGLTVSQLRQYLRVHWAGIKEQLLKGEYQPRPVRRMDIPKAGGGTRMLGIPTVLDRLIQQALHQILSPLWEPWFSAHSYGFRPGRSAAQAIKTAQKHVQSGHRWVVDMDLEKFFDRVNHDVLMARVARRVKDQRVLKLIRRYLESGIMLGGMVEQRTEGTPQGGPLSPLLSNILLDDLDKELERRRHKFCRYADDCNVYVGSQRAGERVMKSLTQFLQAKLKLTVNPTKSAVDKPWKRKFLGFSLTAERGIRIRVATPSVKRLQDKLRAKFREGRGRNLRTFIEGLKPLLRGWANYFSVAETRQVFEKLDEWIRRKLRCMEWRKWKRPKTRLQRLTALGLDRERARLGAFNGRGPWWNAGASHMNAALPTSYFHKLGLILLTEEVDWQTALRTARSL

SEQ ID NO: 482 - protein, 464 aa, synthetic construct
  source 1..464: note = MG153-40 reverse transcriptase
MRTDDAEAYVSAASTGKGRRNRLGSGAGAEVRTAAVGRTKPEALRLMEAAVERSNMLCSYERVVKNKGAPGVDGLTVAAFKPWLQAHWPRVRQALLAGEYMPAAVRKVEIPKPQGGVRMLGIPTVLDRLIQQALHQVLQPLFEPEFSESSYGFRPGRNAHQAVKAARGYVAEGKRWTVDLDLEKFFDRVNHDVLMARVVRKVNDERVSKLIRRYLEAGLMEGGVVSARTEGTPQGGPLSPLLSNILLTDLDRELERRGHGFCRYADDCNIYVGSKRSGQRVMRAITAFLEQRLKLKVNAAKSAVARPWQRKFLGYSMTWHKKPKLKIAHQSRERFAEKVRRTLREARGKSLKRAVERLNPVLRGWVAYFRLTEVKGVLEELDGWLRRKLRALLWRRWKRNYTRAKNLMRRGLSERRAWLSATNGHGPWWNGGSSHMNEACPKSWFDRMGLVSLLDTQRRFSSVS

SEQ ID NO: 483 - protein, 467 aa, synthetic construct
  source 1..467: note = MG153-41 reverse transcriptase
MTTENRRKEEAKTEESGRNPVLPLNSAMVDETKREESLLPDNQRYIPIPKIEGVVSDYNIQEATKAVIRNKGAPGIDSITTEEIEGILQKEWPKIKQEILDGKYRPSPVRRVEIPKPDKNGVRKLGIPTVMDRIIQQAIYQELMFTFEAIFSENSYGFRRSRNAQQAVLKAQGYIQEGYEWVVDMDLEKFFDKVNHDILMAKVARRIKDKKILLLIRRYLQAGVLENGLVKPSEEGTPQGGPLSPLLSNIMLDDFDKELERRGLRFVRYADDCNIYVKTEIAGQRVMKSAIKYLTTRLKLKVNEEKSAVAHPWERKFLGFTFKKEEPGKIAIHESRIKRLKDKIRGLTKKMRDGNLTVSIRKFIMPIVRGWTNYFGIAEEQGIFASLDGWIRRKIRGIQWRQWKEPRTRFKKLKSLGIKEQTARNHGYSSKGPWKMARSHVMHKVFSNSTIESMGYIPMAKLVCARS

SEQ ID NO: 484 - protein, 409 aa, synthetic construct
  source 1..409: note = MG153-42 reverse transcriptase
MYEALRRVEGNKGAAGIDGMEVKDLRPYLKAHWQEIKGQLLEGTYKPKPVRRAEIPKPDGGVRFLGIPCVIDRLIQQSLLQVLTPIFDPGFSEHSYGFRPGRGAHQAVQKAKEYVGEGYTYVVDIDLEKFFDRVNHDALMARVARKVEDKRVLKLIRAYLNSGIMVDGVCIRTEEGTPQGGPLSPLLSNVMLDDLDKELEKRGHRFVRYADDCNIYVKSQRAGERVMGNVKRFLGERLKLKVNEAKSAVGKVNARKFLGFTLSSGKRSRIRIASKALERLKDRIRELTRRSWGIRMGERIRRLNVYLRGWIGYYRLAESLSVLNQLDGWIRRRLRVCLLKQWRKPKARWRNLVKLGVSEEWAYMISGSRKGCYRLSLTHQLNKALGLEYWKKQGLLSLAETYLNIRIAL

SEQ ID NO: 485 - protein, 439 aa, synthetic construct
  source 1..439: note = MG153-43 reverse transcriptase
MTEAVGEGVWEQVFERKNLLSALKRVEANGGAPGVDGMTVEALRPYLKAHWLEVRAALDWGSYRPSPVRRVEIGKPDGGVRLLGIPTVADRLIQQAIGQVLTPLFEPVFSPHSYGFRPGRRAHDAVEAAQGHIREGYTWVVDIDLEKFFDRVNHDKLMARVVRVVKDKRVLKLIRRYLQSGVMVNGVVMETEEGTPQGGPLSPLLANIMLDDLDKELERRGHRFVRYADDCNIYVRTERGGERVMNSVRGFLEKKLKLKVNEKKSAVARAGQRKFLGFSYFYRKGEVLIRVAEQAQQRLREKLRGLTRRTRSGRLEEIIQQLKEYMRGWMGYFRLADTPSVFAGLDQWLRRRLRQLLWKRWKRGTTRWRELVSLGVPRSLAGLGATGSSPWRMAATPVVPMALSTAFWDAQGLCSFTEYYHQLHWPRRTAGCGPACPVV

SEQ ID NO: 486 - protein, 484 aa, synthetic construct
  source 1..484: note = MG153-44 reverse transcriptase
MSSLRNEQGRQKLSDRETGEPTQQVKPEGEVQSAEPFPARDDGKSDESDGLSLSKPVWEAVFARANLFAALKRVESNKGAAGVDGMTVKELPAYLKAHWLEVRDALESGKYRPSPVRRVEIPKPDGGVRQLGILTVLDRLIQQAIAQVLTPMFEMAFSPNSYGFRPGRSAHQAVERSQEYIREGYDWVVDIDLEKFFDRVNHDMLMARVARVVKDKRVLKLIRAYLESGVMLNGVVMDTEEGTPQGGPLSPLLSNIMLTDLDRELEERGQKFVRYADDCNLYVTPALAGGARETERAGERVLESVKQYLEKKLKLKVNPKKSKVERATRAKFLGFSFWKRKGEVFIRLAKRTKERFAEKIRYLTKRTRSGKMEDIVSEVNRYTRGWIGYFRLATTPSVYQEMDEWIRRRLRQIQWKRWKRGRTRYRELVRLGVPPKRAALGAVGTSPWRMSHSPIIHEALSNAFWRNTGLESITERYNQFRYSH

SEQ ID NO: 487 - protein, 466 aa, synthetic construct
  source 1..466: note = MG153-45 reverse transcriptase
MKSGGEWRQQLLPFEAEAPTGGAGQNSAGPAGVSRAPWRQPDPASARPTLLREIVRERVLEAAWKQVRRNRGAPGIDGMRVGDFEEWIGVHGDQVRAEILAGTYEPQPVRRVEIPKPGGGVRLLGVPTVLDRVIQQALVIVLTPILDPTFSESSYGFRPGRSAHGAVAAARRHIADGYRWVVDLDLSKFFDRVNHDVLVDRLWKRLGDGPLLSLIRRYLKAGVLIEGVVVESVEGTPQGGPLSPLLSNVLLDEWDRELERRGHRFVRYADDCNIYVRSRRAGERVLASCRDFLERRLRLKVNEEKSAVARPWARQFLGYSVTNGKKPKQRLAKRSVVRLKERVRAITSRSRGISLEQMLRELSRYLRGWSGYFRRIETPSVLEQLDSWIRRRVRSFLLKQWKPGRGRRRAIQKLGVDDGWRLSASRKGPWRLSRGKVISAALPNATLEQRGLVNLKQEWKRLAELF

SEQ ID NO: 488 - protein, 415 aa, synthetic construct
  source 1..415: note = MG153-46 reverse transcriptase
MTTECTMEAMFNWLNLEEALEAVKRNKGAAGIDGKSIAETEQHIEEYWTQIEAKLMAGQYIPSQVKGVKIPKPNGEKRLLGIPTVQDRVIQQAMNQQLSKAFDREFSINSYGFRPYMSAQQAVKQAQLYVQQGKHWVVDIDISAFFDEVNHDILLHQLSQKVTDKRVQGLIRKYLKTGIMIEGKLERRGKGMPQGSPLSPLLANIYLDRLDKELEKRGLSFCRYADDTSLYVSSERSAKRVLESLTQWIEKHLKLNVNQSKSGTGRPWESQFLGFRIGKDGEIGIAPKSIERYKEKVRKLWDARQSLTSKQLIEQWQKYSIGWWNYFKLATKRWTIRCWVGWTRRHIRKCFWQRWHNKKGRLNALRRLGVSEYLQKTASSSRGAWRIASSPALHKALSNATLRRYGLDVPPLSAA

SEQ ID NO: 489 - protein, 422 aa, synthetic construct
  source 1..422: note = MG153-47 reverse transcriptase
MGKQRSMTPHQPSLLMLRIVERNNLQRALKQVQRKKGAPGVDGMTVEELPDYLRAHWPQLREQLVGGTYRPKPVKRVLIPKANGKQRKLGIPTVVDRFVQQAIAQVLSEYWETKFHPDSYGFRPQRSAHQAIRRVQAYTRAGYRTAVDLDLESFFDEVNHDRLMRALHRTHPDTDVLQLVNRYLKAPVSTCDGRLSSEKGVPQGGPLSPLLANIVLNEMDWELERRQLRFARYADDCQILVGSHQAGQGVMASLTRFIEKTLRLKVNREKSAVADVHERTFLGFVLTRRDQRIRVSGKVLEKLKATVRTVTRRTRGHSFRKILEELRRSLLGWKAYFDASEVLSPLKELDKWIRRKLRCYLWKQWGRAGYRRLRELGVSRQLAWNTAKSAHGPWRISHSPALYHALPTSYFRSLGLPELAAR

SEQ ID NO: 490 - protein, 456 aa, synthetic construct
  source 1..456: note = MG153-48 reverse transcriptase
MSLKHAMHQMLGQPGRANVGEGEPQLDVVSDEASLAGHTQEGSGQEDLLQQILLRENLVKAWKHVKANKGSAGIDGLTIEQTTEYLKTHWSKIREELLSGQYRPQAVRCVEIPKPGSGTRELGIPTVVDRLIQQAMLQVLQPLIDPTFSNFSYGFRPARSAHNAVLKAKRYVEEGYQIVVDIDLEKFFDRINHDILIDRLSKKIPDKSVLGLIRRYLQAGTMVNGVVMEREEGTPQGGPLSALLANVLLDEVDKALERRGHKFARYADDCNVYVHSQRAGERVLQSLRCIYAKLHLKVNEAKTTVGTVFGRKFLGYCLRRWSGDTVKIAVATKALETFKQRIRLITCRVGGRSMIQVAERLRAYLPGWKSYFRLAQTPTTFKDLDSWLRHRLRAIQLKHWRRGSTTYRELRKLGATHEMASLMAGGAGHWWRHSKFNLNMVLTVAYFNNLGVPWLT

SEQ ID NO: 491 - protein, 458 aa, synthetic construct
  source 1..458: note = MG153-49 reverse transcriptase
MKNGEEPSPDSTRRLSRPGQAAAAPSEKPSPSLFPERMMEVIVDSANMQRAWDQVRGNRGAPGPDGVTLTQFPEWFRPQWAVIRQQLLDRTYEPSPVRRKTIDKPDGGQRQLGIPNVLDRLIQQAIQQVLTPVFDPGFSDSSHGFRPNRSAHGAAKQVERTIRRGRRFVVDMDLSKFFDRVQHDVLMSRVARKVRDRRLLKLIGRYLRAGVMVEGVLQSSPEGTPQGGPLSPLLANILLDDMDKELERRGLPFVRYADDFVIFTKTRRAAERVFNGVNRYLTKVLRLVVNLEKSRILPADGVEFLGFVFRGVTGTIHVSEKSVQKCKRWIRELTGRSRGISMTQRLGELRRYLQGWAGYFALAKQMRLFENLDQWIRRRLRMCLWKCWRFVRTRVQNLLALGVPRRQAFRHAKSRQGPWHMAKTIASGVGMTNAWLHDQGLVSLKSLWVKRAPLRRTA

SEQ ID NO: 492 - protein, 422 aa, synthetic construct
  source 1..422: note = MG153-50 reverse transcriptase
MKKWYSLIDKVYRLDNLKRAYRAVRANKGAPGVDGETVEAFGQNLEERLHQLHHELKTGTYEPQPVLRVEIPKADGSKLPLGIPTVKDRVVQQALLNIMQPIFEPDFHPSSYGYRPGRSCHQAVAKSERFMNKYGLEYVVDMDLSKCFDRLDHELILEGVNRKVSDGSVLRLIKKFLTAGVMKNGAWEETDIGSPQGGVFSPLIANIYLDRFDQDMKRRGIRIVRYADDILIFARTHREARKYQKLATEILESELKLVVNKEKTHLTSVKKGVTYLGFIIKSKFVSIHPKKIKSFKDRIRQLTPRNHGINVEEMVKRLNPVLRGWANYFRVANCKMLFLQLMEWIRRRLRMKQMKEWKSWKPLHKALRRRGYKGEFRKISVTRWCNSASPLVNMALPNSWFNEIGLINLASYNVGILHHFWE

SEQ ID NO: 493 - protein, 428 aa, synthetic construct
  source 1..428: note = MG153-51 reverse transcriptase
MGDTMTKRKHHSLYGQILQRLDTAFAKVKANRGAAGIDGESIAEFEQDLEANLAQLKRDLKEKTYAPQPVRRVYIPKASGGQRPLGIPTVRDRVVQQALRLVLEPVFEPLFCDSSYGFRPGRSAHQALDRVSGHLREGYKWVVDCDLKSYFDTIPQEALIDRVAEEVADGTVLKLIRSFLQAGVMSEGQLQRTIAGTPQGGVISPLLANIYLHGFDQLMEDRGLRLTRYADDFVILCRTQRAAERVMGNVQSYLEGQLGLTVNREKSKVVHLSEGFVFLGYEFGTWGRRPGPKAILRFKQRIRELTRRNQTIPVDKMVREQLNPYLQGWAGYFGYGQVRQRFLDYDKWIRRRLRMVQLRSWRHMKGLHRAMRQKGWKGPLPAVYVNMRRWRSSVHSLVNYALGPDWIRGLGLVSLVDFHRPTMVTVTR

SEQ ID NO: 494 - protein, 390 aa, synthetic construct
  source 1..390: note = MG153-52 reverse transcriptase
MGQMLEAIADPANLAAAWAKVRANAGAAGVDGQSIAAFDADSEHQLVRLRRRLLSAERYVPPPVLRVEIPKPDGRMRPLGIPTVADRVVQQATRQVIEPHFEAEFLPCSFGYRPGRSAQRAAVWWVKEAIRRGDRWVAEFDVEGFFDHLSHARLLRQVAKKVDDPEVIGLVRRWLRAGVFSAEGLVPSVAGTPQGGVISPLLANIYLHRLDVKVRAAGFRLIRYADDFVILADRRWKVKAADRLVRSILSDMGLSVSEAKSGVVRVRDGFEFLGFTIHGRFLRPRPRALASFKDRVRSRTRRQAPVSMSQMIDQLNPLLRGWGTYYAIGDVVSLFEDLDKWIRMRLRSKARKRFKSKGGPDGQKWPNKAFDDLGLVRLEHLARTGKLSPV

SEQ ID NO: 495 - protein, 386 aa, synthetic construct
  source 1..386: note = MG153-53 reverse transcriptase
MKKRKWYSLVDKIWKFSNLEAAFSKVKENRGAAGIDRVSIGQFERQKQQNLLEIQRLLRSKRYEAIPVRRVEIPKSDGRYRPLGIPTVRDRVVQQATFAVMSPIFETKFLDCSYGFRKGRNTHQAIAKMEQYRNEGCEWVVEADIESFFDTVNHELLIDQVAEEISDGSVLKLIRSWLTAGAFKGTEVIETSVGTPQGGVISPLLANIYLHPFDVQMTALGFKLVRYADDFVIMCRSEDEAERAMEAATRILSGIKLRVKAAKTRIVQLSKDDGIEFLGFTIFKEHKVPRTRAVENFKSRIRLITRRQRPATLQEIIKELNPVVRGWGNYFKIANVNWLYKGLDSWMRMRLRSFLEKKKSYEANKRLENKHFSEAGLTTLSSLIGY

SEQ ID NO: 496 - protein, 460 aa, synthetic construct
  source 1..460: note = MG153-54 reverse transcriptase
MASPATECPAGHSAVATKSSAGHRVGFFAARRAAKSQGRRQGQDGQQRSPKPSSGNARAEGPRRVKRKVSSLIDQVYRWENLYRAWRRIRRNKGVHGLDRVTIRNFEADWEKHLREIQRMLMEQRYVPTPVRRVYIPKPADPTKRRPLGIPIVADRIVQQAIFQVVDPLFDSTMSDRSFGYRKGRKAHDAVAALISDAKQGYRFVLDADIASFFDEIDHDVVMSCVRARIADGRVLDLFEAFLKAGVSEDGEVSVPDKGVPQGGVISPWLSNLVLDHLDKAIEKEGWRHARYADDFVVLCRSREEAQRALTVVKEVLETLKLSLHETKTRLTDCEQGFEFLGFHFRHYRLGIRESSIERFKDRVRALTRRWQGRNVDAVLADLNPVLRGWARYFGVAEVSLTFRYLDSWIRMRLRGFKYKRRCYHDNWRLPSKRLKRWGLLSLQQCRPQLRLSYARAVGP

SEQ ID NO: 497 - protein, 451 aa, synthetic construct
  source 1..451: note = MG153-55 reverse transcriptase
MQESGSAKTMTNDETTRPTAVAGLDQPKQAGNIRDRWGWIEHSVWTERMLTRLEASEPTTVWYGLWDKVHSERNLEAAFWAVWRNRGAPGVDGQTVRQFEAQEQAQLAKLREELRSKRYHRQPARRTWIAKPGTLEKRPLGIPAVRDRTVEAALKQVLEPIFEQDFAEHSYGFRPGRGCREAVKRVEALLGQGRVWCVDLDFKSYFDTIPHERLLGLVQQRVVDGSVLALLAQGLKAGVLETLKGWQPTEVGTPQGAVISPLLANLYLNPLDHAMAERGWEMVRYADDLVVLCQSREEAEQALAYLRQWSGEAGLSVHPTKTRIVNAHSEGFDFLGWHFRGGKKWPRKKSLQKLRDKLRPLTRRTNGRSLEEIITKTNRILRGWHGYFRESHPTGLSGPDGWVRRRLRAMLRKREKRPGYGLSEADSRRWPNRWFGVQGLFSLEHGSCAYG

SEQ ID NO: 498 - protein, 418 aa, synthetic construct
  source 1..418: note = MG153-56 reverse transcriptase
MKAEGTGQKVHSLIDKVYHRINLDMAWESVRANGGSGGIDKIAIPAFQAVAEVELERLHEELKQGTYRPMPVRRILIPKKGKPGEKRPLGIPTIRDRVCQQALKNRLEPIFEPLFSECSFGYRPGRSTHQAMRKMYREILDGYEWIVDADLRDFFGTVHHEPLIDRIAEQVSDGRILKLVRQMLEAGYMEDGKKYATPSGTPQGSVVSPLFSNIYLNRFDHEMTSKGYRLTRFADDWVVLCKTRAEAARAIRDARTILESLGLTLHPEKTKITHIKWGFEFLGYKLKRGKGLSLPQEKVKKQPKTNIYAFPKAKSVQSFMDTIRTRTHRRIPLTVFQLIDSINPVIRGWGNYFRKAHVRKLFNRLQRWIVRRIWSHRYKRWRNAGWKKLPESILYSKYNLVNLLSLIPDLNLRTAPKG

SEQ ID NO: 499 - protein, 431 aa, synthetic construct
  source 1..431: note = MG153-57 reverse transcriptase
MEVTRRDRVKAGLLENILSRDNMLAALKRVKANKGSHGVDGMKVDELPAYLKAAWQTIRQSLLDGTYVPQPVRRVEMPKPDGGVRLLGIPTVLDRLIQQAIAQILSDIFEPGFSCHSYGFRPGKGAHDAIRAARDYIRAGYDYVVDIDLEKFFDRVNHDKLMARVARKVDDKRVLKLIRRYLTSGVLVNGVRVASEEGTPQGGPLSPLLANILLDDLDKELERRGLKFCRYADDCNIYVKSKRAGERVMASIGRFIRERLSLKINENKSAVDRPAARKFLGFSFYRKKDDVGIRIHPKSVKRFKEKIRSITNRNWSMSMDERFRRLHSLCAGWIRYFGLADAKTHMRELDEWVRRRIRACFWKQWKRIKTRHDNLVKLGVDSMKAWEWANTRKKYWRIAGSWVLATTLTNQVLEDMGFRNLSKLYSEMTYS

SEQ ID NO: 500 - protein, 471 aa, synthetic construct
  source 1..471: note = MG154-1 reverse transcriptase
MKPIIIEDGRTIVLARGYFSPHRYGTGRFGGFNQIQDGLLADPELLRQVVSTIMCPEERTLIPENDFYPECWEPEKYEADGPLGSIDAFFTTFRRIARHDMYCSTVEQGEWVMAYGTEQLTYRRMNRPLDDKHFRLKSIRLPDESDRALVKKCFEFRVAPAITHCLIVGRAFMREDKPMYKHFKKRTTSKVRDIWAPEPEVKAALRHLLHPLNSAYDMKRSGSPQYAYTKDRNILMNAEPHARNKWMLNADITGFFDHCDWDLVKGYMRFLMKDISAEDKAVLKVMLINPATGGLYQGSPVSGALSNAILRPAAKYMKAFFQKEGRTLTVYADDITVSQGAAIDSTVRKNIVGKIRHAFEKFDLPFDLKPSKTRVSRNNGRKVTGIRINHLDQCTIPLPKYRLLRSMLHRMSSGGDVTMAKSQLKGYLEFARFNDRSGKIDRLIDKYRDVLVDKGMIRPILDPQPVEIPEE

SEQ ID NO: 501 - protein, 541 aa, synthetic construct
  source 1..541: note = MG154-2 reverse transcriptase
MDDKNKLYLINDGKTIVTRFGAITPFHQSKKYEDTLKIPEKFLEDPESLRQLIGFKLFEDRTKIINKNDFYMRDPQVYKKGKQTTLISFLQAAHKVMRLHYENYRVEIFSKYVVVLNCPTIKFTGTQVKETCHIDSKTANGERKPLLISACYKVEDDDERTKIFDLLTLKYAPAIIDVYITTLRLEAAGTKLYQYYKVPTSTKVREIWAPEDSLKDSMRHLLLPLTSAYDMKKKNSTQYAYIKERSIVNNAEVHKDNKYIAKFDIKGFFDFCNWDLSWKYLKFLFPKDKYGKKAELYDDVKNTLKRVIINEQTGGLFQGNPVSGVISNAILRPFSNYILNILEKQADVKNGVFPSINEKNAETESIDPEGNITTKFDGKEYKSFSKYTDPSNEDLRYAVSVYADDITVSSNYPIDWNEAKRISGILRYSFEHLELPFKLNLKKTSIARNNGRKITGVRINHNDVMVVSRVKYMLLKSMCHRIKHGKKISMPKNVFQGNLAYARFVDHSGKIETLIAKYHANLVEFGINLKLPGELADSYVE

SEQ ID NO: 502 - protein, 324 aa, synthetic construct
  source 1..324: note = MG155-1 reverse transcriptase
MLLEKLQIQSNQSLERLERFATSASKRYKVFQIPKRSGGFRIIEQPSKEIKAIQRWLIEALFDEFPIHHSATAYIRGKNIRSNAEVHAESNFTLKLDFENFFPSFTERHLIKFLRNYPLIEKKQINDRDINFISRICLRNGRLTIGAPSSPTITNAMMYQFDTLMSARCAEDNFSYTRYADDVFVSSRSYINVGEIILFVENLLSKYEYASLRLNKDKTAILSRKGRRSITGCVITPQRGISIGRKLKKSIKHKIYESINGRLSSLEATKLMGYLGFLKDIEPNYFESLKKKYGADAIKTITSGNYDEIKLVPLILDDLDDTPF

SEQ ID NO: 503 - protein, 314 aa, synthetic construct
  source 1..314: note = MG155-2 reverse transcriptase
MVSDILDKISKDLLCSRDVLLRMYHRAPHAYKFYDIPKKNGGVRRIAQPAREVKKVQRWVVDNILSSVKPSAFSTAYLEGSSIKKNACMHLHNAYIAKFDFKNFFYSIKFSDVKRTLEVKYGMEEGQSKFIARLCSVSIEGNLCLSIGAPSSPSLSNIVMYDFDEYLAGRCLSLDIVYTRYADDMTFSSNEKGVCFQIEGLIVDALRNTESPELALNHKKTNFISKKYRRTVTGLTLTNDKKSRISLGRDRKRLIKALVHRSIINKLDKEELEKLQGLLGFAYHNEFSFYNSLCDKYGFGVVSNLMKQKSPTIT

SEQ ID NO: 504 - protein, 310 aa, synthetic construct
  source 1..310: note = MG155-3 reverse transcriptase
MELINKLATKLNKSESEVIRFLASAPLKYKVYTIPKRTSGHRVIAQPSRELKEYQRAFISLYRLNIHDAAMAYRERLSIKDNAKFHCKNRYLLKIDLESFFNSITSELFWTIWQQHYEMPNNDEKVLMERLLFWSPGKSSTGKLVLSIGAPSSPLLSNFFMYQFDELVTRHCEKLEIKYTRYADDLTFSTNAKNVLFDMPRYISDTLTTLFGSALIINRRKTAFSSRAHNRHVTGITIDNESDLSLGREKKRYIKHLVHQYRLNKLDKENVFHLKGLLAFAKHIEPKFITSLETKYSAEVITQIFEEQHG

SEQ ID NO: 505 - protein, 308 aa, synthetic construct
  source 1..308: note = MG155-4 reverse transcriptase
MLVINDLGKRLNQSDLAVKAFLENAPRKYKVYRIPKRTTGFRIIAQPAKELKAYQRAFIELFHFPVHECATAYQEGKSIRDNALVHARNPYLLKTDLEDFFNSLTPDIFWQCIEHCSADAPEFLKEERRYVERLLFWQPAKRSKRLILSVGAPSSPVISNFCLLELDRRISEECRHLEVDYTRYADDLTFSTRIPGVLSAIPALIDSLLKQLYNSKLRLNRGKTLFSSRAHNRHVTGVTLNNEGELSLGRERKRFIKHLIHQYDTLDKEDKAYLVGLLAFASHIEPEFIIRMNAKYTTELMDRIRRQQ

SEQ ID NO: 506 - protein, 313 aa, synthetic construct
  source 1..313: note = MG155-5 reverse transcriptase
VVGLLASKLDDKPSPKVVEAFLRDAARKYCVFKIPKRTQGFRVIAQPSRELQRYQRTFLDNFSLPVHSAAMAYRKGQSIKENAEAHLKQKFLLRMDLENFFNSIKPALFCSVWQSFADLPSLDETDVGLINQLLFWCPSQRRGGKLVLSVGAPTSPMVSNFCLYHFDQALTEFCDTERIVYTRYADDLTFSTNMPNVLEKIPKQVQKLLKEKLTGKNYQLRVNRIKTVFSSKRYNRHVTGITLASTGKLSIGRERKRYIKHLVHQFKMGELEKVEDIAHLKGLWAFAKHIEPEFCRALERKYGLVTMQRIKEA

SEQ ID NO: 507 - protein, 319 aa, synthetic construct
  source 1..319: note = MG156-1 reverse transcriptase
MWRYCTDEEAIRSFHLTDGLQCKEGKEIQTLFAVSNHAEVHYHTAYIPKKKGGRRKLLVPDALLGRIQKNILQNVLAERKVSPYAKAYIKGMGIVENALPHSHAEILLKLDIEDFFENITYLMVYQKAFPEKYFPPAIRTMLAHLCCYNDYLPQGAVTSPMISNLVMYSFDEYIGKWCGERKIAYTRYSDDMTFSGDFEVKEVKHKVRSFLGKMGFLLNEEKTRVLKQYQRQIVTGIVVNEGTNISKSYKRSIRQEIYYCEKYGAKSHLQRRNLSEKEEVPYLKQLLGKVNYVLQINPDDKNFQEAKKKIKEMLLKIKG

SEQ ID NO: 508 - protein, 333 aa, synthetic construct
  source 1..333: note = MG156-2 reverse transcriptase
MISTGLWKYFTKEHHKEFVLSLGLLNDTGWPIEKQLRCLYTVSNHTERHYTRLTVPKRDGTIRELLSPDPLLKKIQRNILHNVLEELPVSPHATAYRRGAGILGNAFPHQGRKQVVKLDIRDFYGSITFLMVHRAFPRIYYPPSVATLLTHLCCYQDCLPQGAPTSPTISNLVMKPFDDHMGTWCKERGIIYTRYCDDMTFSGDFDAEPLIRKVRSFLLSMGFELNERKTQILCGGKRQSVTGIVVNEKPQVSRVYRDKLRQELYYCQKHGVASHLLWLNDRQYLPPEPEQIERYLRSLIGRINYVLQVDPLNLYFAEARTTIGNMIKDMESG

SEQ ID NO: 509 - protein, 321 aa, synthetic construct
  source 1..321: note = MG157-1 reverse transcriptase
MASPSQTSKLRMLGLPIFDDLESFAQVTRLSKKFLYLHSSFSDQHYKKYFIPKKSGGQREISQPSKAHKAIQGWILRNILDLLQVSQASKGFAKKQTTADNAIPHIGANAILSLDLEDFFPSITANKVYSIFHSLGYSKPISIMLTSICTCGGKLPQGSPCSPKLANLVCIRLDNRVQGYVGARGVTYTRYADDLTFSAAHPGKLMHIFNFIRRIITEEGFSLNESKTRLAGTRLRKKVTGLVVTEGAVGVGRIKYRELRSKVFNLTKTQDIFYDQKEINEIYGWLGYLKSIDSKRYEKLVSQIETLKKNHKETSLDYLLV

SEQ ID NO: 510 - protein, 300 aa, synthetic construct
  source 1..300: note = MG157-2 reverse transcriptase
MNYSNISTLVKQMLLKIHDDIYKKINQNYIDVFLCGGVSSSRNISVRDIIRKELEKKKGIRILYPEELFMEILNKDKESDLLSLEKFLADNCDIICIICESAGSLVELGAFTNNDATVGKVIAVIEEKRKKDKSFIMLGPIKVIERINNRNVFFYNKNKLEDLSNELSREIKLRRFRGVIKIETEQNKPLNTILGLYYILPLMLYFFKSLEYIELTNYLKYLFKIKGYDDSDFEWLFRSSLKLLYKDRYIYKTTVKEKTFYSLTQKGYNNIYNVLYSIDINNRTLLYDSIRLGIIKSAYY

SEQ ID NO: 511 - protein, 319 aa, synthetic construct
  source 1..319: note = MG157-3 reverse transcriptase
MAKTEIIKLNMLGLPVIQSLDDFSAVTHISKYTIYQLSYHSEKYYKTYDITKKSGGKRTICQPSRKLKGLQSWILVTILNKIQVSQSCKGFRKDSSTLDNAIPHIGANTILNLDLKDFFPTVISKQVFNIFKTIGYNNLISTVFTNICTFEGKLPQGSPSSPMLANLSAWTLDLRIQGYVGKRGINYTRYADDLSFSGLNPSKVVKIIPMIKTIIDSENFVVNHKKTRVASSARAKTVTGLVINEDSVGIGKQKYKDLRAKIHHLTLPKEQKNEELLYHVSGWISYLNSVDKLRFNKAKKYISELTKKHPKTLIARLDK

SEQ ID NO: 512 - protein, 322 aa, synthetic construct
  source 1..322: note = MG157-4 reverse transcriptase
MAKNENIRLNMLGLPIIQTIDDFSQITHLSKYTLYQLSARSDFHYKKFPSKKKSGGTRTICQPSKNLKGLQAWILVNILNKLKVSDSCKGFEKGSSTADNARPHINANCMLTIDLSDFFGTVTDIQVYNVFKSIGYNKLISTMLTNICTCDNSLPQGSPCSPKLANLITWKLDKRIQGFVGKRGITYTRYADDLSFSGLHPANTVQILPVVKSIIEDEGFLINPKKTRVAGANRAKRITGLVISNNRFGVGTKKYKMVRSKIYHLTKLSEQKNTILLNEVTGWISYLNSVDKPRFRKALKYVEELKKKHPKTLVDKITGYNN

SEQ ID NO: 513 - protein, 355 aa, synthetic construct
  source 1..355: note = MG157-5 reverse transcriptase
MNNIKTKTNYFLLNTLGLPIIDSLDSLSDTLAISKNMIYLLSKCNYNYYVKTHIPKKDGTKREILIPNYSMKMTQRWILQNILYKIRVSDNAKGYKKGIKAPLVENAMMHHEQLYCLILDVENFFPSIGVKRICNLFERVGYNSLISYILARICTYKDYLPQGAVTSPYLANLVCFKLDRRIDAYCCKREISYTRYCDDLIFSSDNLDSLKKAYKMFEVILCNEGFKLNRRKTRFLTPNTLKQILGITINDELIKAPKIMKRKVKALIFKSIVNKDYRKNDVIRGYIAYIKSIENNYQNKIEKYVKRLHNKDFIRGDLEVVKAYNENKLYSNFPDLAFSKAAALFLENPELEELM

SEQ ID NO: 514 - protein, 338 aa, synthetic construct
  source 1..338: note = MG158-1 reverse transcriptase
MLYLEKLVESMEGKYETKYISLCAAYSEQLISKGMPVIFDGQHLAKLLGINFSILSYYVYSTNKFYQEFEIDKKSGGSRKIEAPSRNLKKIQRWILDNILNKFELNENTYGFRKGYNIVDNAKNHTNKFLVYNIDIKDFFPSITREDVFYIFYNKGYTYEVSYIFSKLLTYKNHLPHGAPTSPYIANLRCEKMDYSLNVYTKRINADYSRYADDITISTNNAHDFIDNIKIIKKIITNNGFVLNEKKERIQYYKSMQEVTGLIVNNGVKVRRRFKKDLEKEIYYCLKYGVSSHLTRTEKNHLSFYKEYLYGKVNFIKMVEPELAEFYLKQLSEINWYS

SEQ ID NO: 515 - protein, 471 aa, synthetic construct
  source 1..471: note = MG159-1 reverse transcriptase
MATDTLAWADVDAAGGIRAWVDAEVARQGLADPGATQSTSEAKSRGVGTPTASPAGRGSSPVEKMSDAELKLYKARRDEERRVRRELYRRAWQAYRRSHIVHLGPGVFWHDTADVDRFDADDPERKRQDNALPALADVEALAKALGLTIARLRWLAYHRDVDTGTHYHRWLVPKRDGTPRLISAPKPELKAAQRWIMREVTEHLPMHGAAHGFIPGRSIASNAVVHAGARVVVKLDIRGFYPTVTMRRVKGLLRRAGLGEQVATVMALLATESPREKVETHGKTHYVALGPRSLPQGAPTSPSITNALCLRLDCRLSGLARKLDCRYTRYADDLTFSWHGAARAQIGSLLRAVGKIVRAEGFEVHMKKTRVMRAGARQKVTGLIVNQAPPDRPAARVPRDTQRKLRAAIRNRELGRPGKGETLDQLKGMAAFVMMTDPARGRAFMERIERLIAAGTQGADGAPGTPERGSP

SEQ ID NO: 516 - protein, 511 aa, synthetic construct
  source 1..511: note = MG159-2 reverse transcriptase
MSDQTSTTEPAPSADTPSALASADGQPSGAEAWAEIDEAGGIRAWVQAELTRRGLIDDADTTSMSDKERKRYRARRDEERRVRRLLEARAWAAYRQAHLVHVGLGVFWHDTADYDRYDIAEPEVRRQDNDLPALADVQALARALALPIPRLRWLVYHREVDSGTHYHRWTVPKRSGGERLISAPKPTLKRAQTWIARNITEHLPVHGAAHGFLPGRSTATNAAAHAGAAVVVKLDLRDFYPSITLPRVKGVFRKAGYGEQVATALALLCTESPREEMVVHGRRYHVAVGSRSLPQGAPTSPSITNALSLKLDCRLDGLARKLGFRYTRYADDLTFSWHQDEDAPVGRLIRAVERITAEEGFAVHEKKTRIMRAGRRQKVTGLVVNRLPRRPSGQASDESRGQPSEEPLGHGASGQEPGVGAPRARVPRKLVRHLRAAIHNRAQGKPGQGETLAQLRGWAAYVHMTDPARGRAFLDQLDRLASAGVGDETGAGAGDEASAGTSDLPATGDKS

SEQ ID NO: 517 - protein, 633 aa, synthetic construct
  source 1..633: note = MG159-3 reverse transcriptase
MSDQARRAAIQARIAQSSRDDVILDEMIRLGFWDAGGDPHAAELTEIMARSKEIRSELSQLNSQNARYLDPEAALKAMHAERKAAALARRKETKLARARARQARAEAWAQRSRDAVWHLGPGVSAALEQGEGKSAPRSLAPGLPALATPAAVASAMGVSTGELRFLAYARPMSRVSHYKRFEITKKSGGKRVISAPMPRLKYAQYWLLDAVLSKLPLHPAAHGFVPGRSILTNARPHVGRDVVANMDLRDFFPTLDDRRVKGLFESLGYGEDVAQVLALIATEPVTDEIEIDGRVTHLARSPRRRLPQGAPCSPAITNLICRRLDARLAGLAAKLGFAYTRYADDLTFSASGEDAKKVGALLRAAQEIVRAEGFEPHPDKTRVMRRGARQEVTGLVVNDRLGAPREAVRRARAALHRAERQGVAGLKFGSGRDALAGLVGFAQFVAMIDPRQGASLVARARALRRGADEGATSMLSRAGLARAGLGAAALRKAAAAGAPPEAMRWRPAERPAPTLDPVLVEAERAAAAKARREAEKEGSRQAKSARSGTSVPPVRGAGTGASGGGGPARAVWGRTATPELGESSAEWARPATPRRSFWSLAVTGWLILMALAVLPFAPWLTALLGYLVYRRLR

SEQ ID NO: 518 - protein, 264 aa, synthetic construct
  source 1..264: note = MG160-1 reverse transcriptase
MPYNYDLCFKTPQNRWIFVPTSECRDNGYEYVKLIRRKWTLPNFYYHLKAGGHIAALKLHEGNNYFAKIDIKSFFPSISKAKVIRALKDIGINYKLAELIASWSTVKSKENSTKYIVPYGFVQSQIIASLCLDKSAIGSFIKNKLPTDVKVSVYVDDIILSSNNPSALQDIYNQIIATFDKTGFTVNTEKSHEVLDQTTTFNIVMNAEDMQITEDRFTDFESAITPLNIKRSEAIINYVSSVCSIQSETLKEQLKSMIDNSKCA

SEQ ID NO: 519 - protein, 296 aa, synthetic construct
  source 1..296: note = MG160-2 reverse transcriptase
MQWLRYYELSPGSQKYIYIPTDESRLIGSEIINVLKYRWKKPEYFYHFRQGGHLSAIKVHFYDEEPCQFSVFDLSGYYRQITRSKLVRVLKKYVGYEQALDWAQKSTVLQNGDLGRSIPLGFVQSGFLASLVLDNSCLGKTLREINKTPNIRISVFVDDIVISSQDHELLSFYSQKIKEASKKSNLTLQHRKTFCNIDSINIFNLSYKSGSEIDFCADRVNNFKEILVKNCDRKFVVFGVIMYMLKVNAKRTLSILDSIVQEKGISKTGILGKFYYEHKIKENQNIIETLRKVCFQ

SEQ ID NO: 520 - protein, 256 aa, synthetic construct
  source 1..256: note = MG160-3 reverse transcriptase
MSNYTPKWIHRITLENGKWIFVPSQSSRLSGKAIVKKVKLEWAPPKYFYHLRRGGHIAALNAHLENKYFSRLDIKNFFGSITASRITRTLKPYFGYNLSRDIAKQSTVRIPGLLERKLMLPFGFIQSAILASICLDKSSLGIFLKRIKRDKSLSLSVYMDDILISSNDQQRLIEVTAELKSYFSKSHWVSNTGKEVIAADSMTAFNIDMLQYEMRVSEEKMKQFAFNFSETENINKKKGIYSYVKTVNDGQLIDLV

SEQ ID NO: 521 - protein, 251 aa, synthetic construct
  source 1..251: note = MG160-4 reverse transcriptase
VTQKWTHRYQLKPGRWVFAPTDEAKKCGAHIKRSVASRWKAPNFYYHLRNGGHVAAVRSHELSRFFFRADLDDFFGRVNRSRVTRCLKPWFSYAEAREMASESVVKRPGETAFVLPYGFVQSPILASLALDKSKLGSLLRSLDGGRDFTVSVYVDDIIISGDDEAQLKEVASRLERVASEALFPLSSGKTQGPASGVTVFNIELSHRMLRITDDRLASLRLDYQATASEHCKAGIVSYVYSVNPDQVAQVT

SEQ ID NO: 522 - protein, 231 aa, synthetic construct
  source 1..231: note = MG160-5 reverse transcriptase
MQWSSYYELTPGSKKYIYIPTEQSRELGKLIIETIRKRWTPPAYFFHLRKGGHLAAIKHHIDKSCKPRKFSVFDISGYFGQVTENKLRRVLKNFVSFKEASQWAYDSTVRKPSEDRRTLPYGFLQSGDLASLVLDRSYLGCEFRKIHQNPNIKLSVFVDDIIASSSDPILLEEASNSIINAAKLSNFKFNQDKIRCNVDEIEIFNIHCSQDFGLSFSQEKLKKNSTNSKKL

SEQ ID NO: 523 - protein, 255 aa, synthetic construct
  source 1..255: note = MG160-6 reverse transcriptase
VKTYRKKIDLGEGKFAYEQTAESYKYGKMIIKKIKQKWAPPSYHFHYQKGGHLAALNAHRNSNCFSKIDLSKFYYKITKNKIIRNLKKIGFTFQEADEIAALSTIPHNGYFVLPFGFVQSSIIASLVLSKSAIGSVFKNTPDAIRLSVYVDDILVSALDKQVLVESFSQQICDAAEKSNFAINTAKTVLAQTDLEIFNIDICRNKWKISDNRMSEFMVEMSLTEDDNRAEAMIKYVSNVNLAQSESMRRMRDMRG

SEQ ID NO: 524 - protein, 251 aa, synthetic construct
  source 1..251: note = MG160-8 reverse transcriptase
MPINFKFAYECKGKRIFVPNDECVRRGEALIKYCSQAVDFPSYFYHYRAGGHVAALHRHLEHRFFFRIDIENFFYSISRNRVSAVLHHIGFRKARPYAEWSCVKNPFGAPAYSLPIGFVQSPMLASLAILRSPVAAAIERAAAAGAFVSVYFDDFIGSAVDREPLEKAFQDILHSCQEANLISNQLKLAKPSEHILAFNCDLSHGIAEVAEARVAKFFKAPRSQWAEAAFREYCNRVARNNHKSEGRRFLR

SEQ ID NO: 525 - protein, 257 aa, synthetic construct
  source 1..257: note = MG160-9 reverse transcriptase
VDRWINRFKLNHSIWVFVPSDDSRQVGRKIKTAIEKNYKFPEFYFHLKNGSHIKALNSHMQHEYFASLDIENFFGNINKSRITRVLKIFFSYDEAREYANWSVVRNPDENSNESILPFGFVQSPALASLCLDKSKLGRVLRNINNLDVSVSVYMDDIILSSNDKALLYKSLKKVEEASEKSKFPLNKDKKNNPSNKVTVFNIDLSRGKLQINNKRIKEFQSAYEKTGLDEEKKGILNYIKTINPIQEKQFIDKINKI

SEQ ID NO: 526 - protein, 251 aa, synthetic construct
  source 1..251: note = MG160-10 reverse transcriptase
MFSKRWDNKFLLKKDLWVYVPSDEMYAFGKKIHTTLSMRWKRPANYYHLLAGGHVAALKYHQSDSYFAKFDIKNFFNSISKTRITRSIKSLVGYSAAREIATVSTVPVSHQQSFSHCLPYGFVQSPILASICLSESYLGRLIERKCKSCKISVYMDDIVISGNSESDVDALLNELLSAASKSHFEVNPSKVRLTSHTLESFNIELSQQTLNITADRLDAFKQEILNTENQAKIDAIIGYVKTVNVSQAGSL

SEQ ID NO: 527 - protein, 254 aa, synthetic construct
  source 1..254: note = MG160-11 reverse transcriptase
MAFHELWDQKFELVPGKWVFIPSTESRIRGEYIASEIKRKWQAPFYFYHCRQGGHVEALKKHMASRYFCCIDIKSFFASINRSRVTRVLKKHFGYVIAREFSRDSVILLNENDSKKYILPFGFLQSPIIASICLDESALGRRLCKLASSYNFIVSVYVDDIILSCNDIDLLRKEFENIIIATNRSGWKISTEKTYAPSEQILAFNIQMSHGYLGILPERMNLFSTAYQKAESDHQKEGILRYIRSINPNQTVLL

SEQ ID NO: 528 - protein, 251 aa, synthetic construct
  source 1..251: note = MG160-12 reverse transcriptase
MPAKYSSKFQLKPEVWVFVPTLPSLKLGEEIKTLLEKRWKAPSYYFHLRKGGHVAALRSHFSHKYFLHLDIQNFFGSINKSRVTRNLKKFFPYLTARDFANHSTVVHPETKKTVLPFGFVQSPIIASLCLEQSALGSHLDKLHKTAEISVSVYVDDIVISADNEAAITAIKEQTIYAAEQSLFSLNEKKSEGPSLQITAFNIQLSNAMMNITPEKMREFKKTYGDSSSEDQRRGILGYISSVNYDQLSEVI

SEQ ID NO: 529 - protein, 256 aa, synthetic construct
  source 1..256: note = MG160-13 reverse transcriptase
VRNLFDHHFTLKPGTRVYIPTDEGRDRGREIKRRVEKAWKAPPNFFHLREGGHVAAARRHKDHPWVASLDLQRFYDQILRSRVHRSLKRIGFDHDDAFEMACDSVVDKKPPQREFSLPFGFVQSPLLASVVFHHSALGHAIRQLKRDGLTVTVYVDDVTLSGETEQAVLSGVQELETAAADSNFAFNEAKKQGPCDEVTAFNIRFGSGTFEIEEARMDAFKRAIEVGSDWSIDGILGYVGAVNQDQFEALVAGTGN

SEQ ID NO: 530 - protein, 251 aa, synthetic construct
  source 1..251: note = MG160-14 reverse transcriptase
MASLWSNRFETKKGRWVFVPTSECRAAGQVIRKQIASRWDPPRYLYQFRKGGHVSALQLHIANTYFARLDLANYFGSINKTRITRVLKSMAPYRDARQWAELSVVPDPDHPMHWMLPFGFVQSPIIAALSFSRSALGSSIERISTQPNLTVSCYVDDIIISSTNKALVEHAIEDVTTAVMRSAFRLNEEKCEGPTTAITAFNIHLSHRSLMITKERMERFKFTVNNPGSAAQICGIKTYIRSVNGMQIRNL

SEQ ID NO: 531 - protein, 256 aa, synthetic construct
  source 1..256: note = MG160-15 reverse transcriptase
MDSQPRWIHKYEFKPDRWIFIPTEQTIKVGTEIKNAVTTKWPTPSYYFHLRQGGHVAALRHHQADKYFACLDIEKFFNSINRSRLTRSLKQLFDYKTARDYTLLSAVRHPKRVPKTYVLPYGFVQSPVLASLCLRYSTLGNKIDQISRAGAQRISIYMDDIIISGNVESDLRHSMDEIKQAAEKSKFKLNSKKEQEPSIKITVFNVDMTSAYLAIEKQRYLELKCNYQSTTNQNVRHGIGTYVSTINKKQCTALDQ

SEQ ID NO: 532 - protein, 335 aa, synthetic construct
  source 1..335: note = MG160-16 reverse transcriptase
MRFISQTFRRIKMNHRYCRIIFAGYYTVKFLNELIDLLVKILTLFNYFLPKKQMSFPLWSHRYKSKKGKWIYIPTDECRIKGANIIRLLSTFWHSPSYFYHLQKGSHIAALKLHLYNGSDLRQIKNSRYFSYFDITNFFGSINKNKIIKATKCFVGYQMAKDIANASTVTNIGSSEKVLPFGFVQSPLIGSIVLDQSYLGRELSKLSKLHNLKLSVFVDDIIISSDNKKLIQSASERILKAIEKSNLHLNQEKSSICNGSMKVFNIFAKYNCLYLTEHRLTVFAEKLINNSSNYFVVEGIVNYMKMVSPHQSKRLIKEIVCEIGTSRAGFIAKIP

SEQ ID NO: 533 - protein, 265 aa, synthetic construct
  source 1..265: note = MG160-17 reverse transcriptase
MKIQNNNLWDNRFKIAKNGGETWIYVPSDSSRKLGLTIKKHISSNWDIPDYFYHFKSGGHIEAAKLHLNHCHFASIDLKQFFSSLSLSRVTRALKKFWPYEEARILAKYSVVKCLDNRTGQCTMIPFGFVQSPIIASLCLEQSHLGTVLNKIYEMQGIKVSVYVDDIIISGNNLELLEEQYRCLLGAVEKSGLQTSEYKNQEPSSEITVFNMKLKHQSLELKDELINKFHSKFQATDNSNIRDGILRYLVSVNPEQSKLFIENSK

SEQ ID NO: 534 - protein, 262 aa, synthetic construct
  source 1..262: note = MG160-18 reverse transcriptase
MFKSASWINRFEIRPCRWIYEPSQESRINGETLIKQLAVLWKSPDFYFHLRNGGHVQAVRIHLSNKYFAKLDLKDFYGSISRSRITRVLREFYPPDTARRLAKMSTLPHFGDGEHSHSLPYGFVQSPMLASICLAKSYLGSKLAEYRKSKEIRITLYMDDILISSCTEDSLMRCFEDLKDSVKKSKFNVNDDKSHGPQSHTIIFNIEVSQYQMNLTDERFRELHVAYEKSKSKSQRHGIGAYVGTVNKIQALELDKPTFEFP

SEQ ID NO: 535 - protein, 248 aa, synthetic construct
  source 1..248: note = MG160-19 reverse transcriptase
MPVQFQNYEFSYLRSGKPIFAPSDLGKRIGEDIKNQVEAAYSFDDFVFHLRHSGGHVAALHAHRDHKYFARVDIARFFYSIARNRVQRALAEIGILRARHYAKWSCVKNPYLDPTYALPYGFIQSPILSSLVLMQSAVGNYLRSISTGGQISVSVYMDDISLSSDNNDVLVEAFEKLKQNLGEANFGLNIAKERTPSSAMDVFNCDISRGKVGVQQQRVDLFYSQERSPLSIAGFEDYCERVIDGNAP

SEQ ID NO: 536 - protein, 255 aa, synthetic construct
  source 1..255: note = MG160-20 reverse transcriptase
MVPKWSSKFELKLGTGKWVFVPTEESKETGAKIKAAIQECWSPPSYYYHLRSGGHVEAVKSHLGHTTFLHVDIQDFFGSINRSRVTRNLKAKFSYEVAREIANASTVRHPDDKARYIIPYGFVQSQIVAALCLDQSRLGTYLDKLCKQKDVALSVYVDDIIVSCNDADQANAMLAGLIAAAESSGFTLNPDKQEGPAAEITAFNILVANDSMAIDGNRFAKFVEALAATSSEHQRAGILSYVKSVNVDQSDSLVA

SEQ ID NO: 537 - protein, 256 aa, synthetic construct
  source 1..256: note = MG160-21 reverse transcriptase
MPSHKRWNSKFQIKEGVWLFVPTEDTINNGLLIKKLIEANWRAPEHYFHLKSGGHIKALHTHLHNKYFIHLDIQNFFGQINKSRVTRSLKEHVPYEQARKIAVESTVRLPESTPVKFMLPFGFVQSPIIASVCLSKSALGRHLANLVKQENFAVSVYMDDILISSNNLEELNIQMDLIKTASEKSGLPLNEKKQEGPCVNVTAFNICISQGLLKLIPSKLQEFINTYSNSTNEHQRAGILNYVLSVNEDQASLVAL

SEQ ID NO: 538 - protein, 255 aa, synthetic construct
  source 1..255: note = MG160-22 reverse transcriptase
MAQKYISKFQLKPGVWVFVPTIANAAKGNEIKSLLESRWKLPKYFYHLRKGGHVEALKAHLNNNCFIHLDIQNFFGSINRTRVTRCLKDFFSYSVAREYANESTVMHPRERKTILPFGFVQSPILASICLEKSTLGIYLKRLSKNKKIVVSVYVDDIVLSTNDEALFNEITDSLKLAADKARLSLNDEKTEGPSDKITAFNIELSNKIINITDKRIDELKVAYLSADSEHQQKGILGYIASVNELQKNAILEALD

SEQ ID NO: 539 - protein, 262 aa, synthetic construct
  source 1..262: note = MG160-23 reverse transcriptase
MNLKKRWLSKFKIKNSSWVFVPNKYARNYGNNVKIKIDELWKKPDYYFHLRDGGHIEALKCHTNNYYFIHTDIKDFFCCINKSRLTRNLKKFFNYEKARQIANESTIQCPNSNFKKYILPFGFIQSPILASLCLHNSKLGIYLDKLNKLPNISVSVYMDDIIISNKVKSELDKILEDLISISEYSKFPLNKQKTEICSKITSFNIELSYKKLKITKKRMIEFLDDYKNGYKYQKIGILNYIFSVNKKQFEKFLTYLKANCLA

SEQ ID NO: 540 - protein, 251 aa, synthetic construct
  source 1..251: note = MG160-24 reverse transcriptase
MKNYFRKIPLGDGKFAYEQTPEARKEGENLVKQVFKRWDAPSFFFHMKAGGHVAALASHKKNCYFTKLDISRFYYNVTRAKLVRSLQKIGVPFEAAMYYAQISLVCDRGHRFLPYGFHQSPALSALVLDKSLAGRYLREAARKFTLSVYVDDIILSSRNSEALAKSSDQLVQALHGSNFSINESKSKICSASCISFNVLIQENSTEITDQRLDQFKRQISEVNGKESVVQGILQYVHSISPEQAKGLAREV

SEQ ID NO: 541 - protein, 252 aa, synthetic construct
  source 1..252: note = MG160-25 reverse transcriptase
MARSFEKFYEIKEGRFVFEPTTKARKIGEEILNDLFKIWSPPDHFYHLGKSKGHVEALRVYSKSRLFASIDIENFFGSVTRTKISRSLRAIGIDDKKGFSIAYDSVVDFGGTKTLPYDFIQSVALATLVMEFSALGSAIRQAIKSNVMITVYVDDIILSGEHAETLQHHFDEFVRTTNAAKFNISAKKCQNVSDKIEVFNCNLSKSHISTTPKRMAQFKVDYAHASDARRASIEKYITAVNKSQVAELGRLH

SEQ ID NO: 542 - protein, 244 aa, synthetic construct
  source 1..244: note = MG160-26 reverse transcriptase
MPIRFENFDYSFSLKGRPVFKPSERGREIGLQLKQEVEARVAFDTFYYHLQKGGHVSALHSHRPHRWFARVDIERFFYGIGRNRVAGALAEIEIPKAGYRAKWSTVRNPYENPRYSLPYGFVQSPILATLVLMRSNVGRFLRSLPPSITASVYMDDIAISGDDEAELIEAFEELCNVMHEANFVLNRDKLEAPAAAIELFNCDLLHEMTAVREERRALFFDEPHSPASEDAFLRYCDRVEAGNA

SEQ ID NO: 543 - protein, 260 aa, synthetic construct
  source 1..260: note = MG160-27 reverse transcriptase
MKIMEPRWDSKFELKPGKWVFVPNGDTIELGAKIKDELRQRWKAPAYYYHLRQGGHVAALKAHLGQTCFIHVDIENFFQRINRSRVTRVLKGMYSYAEARDIANLSTVRLPEDAQKRYILPYGFVQSTLLASICLRKSALGNYLKQLSATDGIEVSVYVDDIIISLNDEALAENIFADVKRMAEKSGFDLNQKKEQRPADKISAFNIELSQNSLHVLPDRWHAFLDAMREDGNPHRHQAILGYVDSVNPAQANQLQAEML

SEQ ID NO: 544 - protein, 257 aa, synthetic construct
  source 1..257: note = MG160-28 reverse transcriptase
MTIEVQRWEDKFEIKPGVWVYVPSVEARKVGGKILQAVRNKWIPPLYFYHLRTGGHLKAARLHLKSDFFAVVDIKQFFQSTSRSRITRDLKSYFTYSQAREISTFSTVRNLSHSPHKHVLPFGFVQSPILATLCLDKSYFGSLLRRLNKHHDLKLSVFMDDVIISSNDLAQLQAAYDEALVAMRKSGYQANMSKTQAPSSKISVFNLTLSKGVMKVTSQKMSDFLIDFYSSNYEPHRIGVKNYVEAVNPGQAKLFKL

SEQ ID NO: 545 - protein, 254 aa, synthetic construct
  source 1..254: note = MG160-29 reverse transcriptase
MYESSWSNRFEVKPNRWVYNPTNSCRSIGKGIQWKLRKRWTPPPYYYHLRDGGHVAAIEVHLENNFFATLDIKDFFGSISRTRVTRALKKFFPYIEARNFAKQSTVKVMRNYPFSHQLPYGFVQSPILASLCLFDSKLGRELHALHIKKKALVSIYMDDILISSSNKDELIKIYEKLKIDLVKSKFNLNESKSLSVSDSVTAFNIDFKNNDKKINYDRLVRFQYAYLLSNSKAQKRGIASYVGSINKTQAKTFI

SEQ ID NO: 546 - protein, 255 aa, synthetic construct
  source 1..255: note = MG160-30 reverse transcriptase
MPSSERWVSKFKIKPYSWVFIPNKETIQNGINVKKSLEAKWTPPLFYYHLRSGGHVKALKSHVKNNFFIHLDIQNFFSSINRSRVTRNLKVFYSYTDARNIAMDSTVRLPESIDKKYILPFGFVQSPLIASLCLQQSRLGNYLKELYSKKGISVSVYMDDIIISGNNLTNLTLILKKIKLVAEKSKFALNSDKEEGPAKMITAFNIELSHDLLKVSDTRFRVFFADYKMTENENKRNGILGYILSVNKEQASELK

SEQ ID NO: 547 - protein, 255 aa, synthetic construct
  source 1..255: note = MG160-31 reverse transcriptase
MQNSHKWLSRFRLKSNTWVFIPTLETVKEGKLLKKVIEFKWPPPPNYYHLRSGGHVDAVKYHMGGRFFVHADIKKFFNSINRSRITREQKPYFGYEKSRAIAMESTVSIPLDSGQVFALPFGFVQSTIIASLCLRKSSLGNTIEMLNKTDGVRVSVYVDDIIVSTQCLKKAETALLMIQKSAERSGFSLNKEKSQGPSDKITVFNIDLKQNLIEITSWRFNELLSSYKNASSDKQKSGIWGYVNSVNSAQASMLV

SEQ ID NO: 548 - protein, 259 aa, synthetic construct
  source 1..259: note = MG160-32 reverse transcriptase
MIPNFENRFQIESGKWIHEQADEYEVEARKILGRLFSKWRPWPLFYHLRSGGHVAASHAHVGNPLRVRLDIDNFFGSISRNRVVRALKRVGFSYEEADDFARKSTVPFNSGFVLPFGFVQSTALATLVLQKSPLGAALKNMRDRDFTVTVYVDDIIISGDVDPSEMEKEVDKLFREARRSRFSFSSSKIAGPEPSIRAFNLILSPDLVSVAEDRFSEFSEEVDTEGDTPKVRAILGYVKTVNQKQYDYLANLLTDAEGS

SEQ ID NO: 549 - protein, 251 aa, synthetic construct
  source 1..251: note = MG160-33 reverse transcriptase
MVHNYEYKFEIRPNKFVFVPTPQTRKNGKKIVREVMQIWTPEDYFYHFGKRGGHVAAMRPHVGNSFKASLDLTKFFMNVSRAKVVRALKRAGVSSSRSFDIAFSSCVEFKGRKFIPYGFPQSMLLATMAVENSALGSQIKTLKASGVYVTMYVDDIILSHNDKAVLCEAYGELVASANQSGFEVSSKKSSPPSVGVEAFNCNIDKDISIKHDRMAEFVSQICEGTPSTKEAVLRYVDVINSSQADELNLIT

SEQ ID NO: 550 - protein, 250 aa, synthetic construct
  source 1..250: note = MG160-34 reverse transcriptase
MKRWEHRFEVKPGRWVYVPTPIGKASGEVIRLAVSKVWSSPSFYFHLRGGGHVAALRRHTPHQYFFRCDFDDFFGRINESRLTRCLKRRFSYAEARQMARESVVIKPGSKKTMLPYGYVQSPILASLALDKSRVGRFLRQCDLSEHLTVSVYVDDIILSSNDDGLLGDAAAELQQLALDAGLPLSSEKTAGPASAITAFNVELSHGSMSLEHDRLQRFREAYAMASSPQVEAGILGYVHTINPAQVAAVP

SEQ ID NO: 551 - protein, 255 aa, synthetic construct
  source 1..255: note = MG160-35 reverse transcriptase
MNSIWLHRFEIKKDRWIYVPTNESLDYGNWVKNSLEGKWKAPSYFYHLHAGGHVKLVHDAKDYQYFSRYDFENFFAQVTQNRVCRCLKDHFSYDQAREIAIRSTVKQQHTRSVPYGFPQSMLLASIVLDHSRLGKYFNQLRRRGFFVGVYVDDLIIASNNQNELQKASTELERIAIQSNLVFSKSKVERALTKISPFNIDLAYSSLEITYSRYAKFVERIQAENDNFTKDAIKGYVQKINPKQADYLALLGKLDH

SEQ ID NO: 552 - protein, 257 aa, synthetic construct
  source 1..257: note = MG160-36 reverse transcriptase
MLENYDHRYTDDGGRLIFVPTDDGRLIGYDLIRRILKRWRPPAFCYHFQRGGHVAAAEAHLPNRLFVRMDIQRFYDAVSRNKVHRSLKSIGIKQRHAWEAARFATVSRSPSGRGRPYSLPFGFVQSPMLATVALMTSALGNAIAAVHAARAITVSVYMDDVLLSGECASVLANAKTFLEAAAAESGFTFNPEKGSGPTPSVTVFNLVIQHRSMVLTTDRFTDFEDDIRKSRNEDITNGILSYVGTVNVAQATALARL

SEQ ID NO: 553 - protein, 252 aa, synthetic construct
  source 1..252: note = MG160-37 reverse transcriptase
MPQKWDTRFQLKPGTWVFVPTDEARELGYVIKELVETRWRPPKNYFHLTNGGHVRAISSHVHNTTFAHLDIQDFFGHINASRVTRWLTPLAGYAKAREFAKASTVPYPNHGGTMLPFGFVQSPILASLCLFHSALGRCLAELPRKLGAVVSVYMDDIILSASDHSVLEQAVKMVEESAERSGLPLNPDKHEGPAAGITAFNIALAHQSLRINDERWNSFLTEFQASDNDSVRRGIHSYVHSVNVEQANNLGL

SEQ ID NO: 554 - protein, 256 aa, synthetic construct
  source 1..256: note = MG160-38 reverse transcriptase
MPTFYDHKFTSPTKPKRWIYVQTDDERAAATHLLAVLRKHWTPPKYFYHLRKGGHLSALQQHAHDIFFAVLDIEGFFGSITKNKIARALKNIGFAWQDAVTVAHRSCVQEGTKRILPFGYVQSPMLASIVLNKSALGSALEAVKKQGLNVSVFMDDIILSHPDNSDLVGDALTTLNEAADISHFHFSAEKSQAVAEKVHAFNIILSSESLEISPNRFEKFAQTVLQAGDGATRAGILGYVAQVNTAQYDQLAQLTH

SEQ ID NO: 555 - protein, 275 aa, synthetic construct
  source 1..275: note = MG160-39 reverse transcriptase
MPLAFENFLYSYKKNGKPIYAPNPFGEKLGAELKRKVNKAYKFDSFVYHFKDGSHVLALHQHRNNQFFCRIDISKFFYSVQRNRVKRALKDIHVQRPEYYAKWSTVKNPYGAGYVLPYGFVQSPILATLVLAKSSIGIYLRGLPTSVTVSVYMDDICLSGNDEAELQTAFEGLIVAVAEAGFALNHDKTRPPAAQIDIFNCSITTGQTEVLQDRIDEFFAEDRSAASEEGFKTYCNIVESMTWRTGHKKKRRRVYFRSLPKPAPVVAAAPVTQTI

SEQ ID NO: 556 - protein, 275 aa, synthetic construct
  source 1..275: note = MG160-40 reverse transcriptase
MSLTWVHRFERKPGRWVFEPSEEARKQGAEIKALIETHWKPPSFYFHLRQGGHVAALRAHLASTWFVKLDIADFFGSVSRSRIARLLKEFVPYRDALHMATSSTVRHPTEVSRLMLPYGFVQSPVIASLALAKSALGKYLRTLHSDQDLVVTVYMDDVIVSGVDEHRLADVAQKLDSLAKRSRFELNADKTHGPLAKLRAFNIDLADAAMVIAPNRLDQLKNVLEESTNGFQIEGIRSYVKSVNEEQAAELGDPLAGTDTEPHGASKDDLGKPPA

SEQ ID NO: 557 - protein, 235 aa, synthetic construct
  source 1..235: note = MG160-41 reverse transcriptase
VFVPTPAAAATGEWIKAQIEAHWTPPDYYYHLRSGGHVAALKSHMGHTNFLHLDVQDFFGSVNKTRVTRCLKTKVGYALAREWANASTVTHPKNKTRSIIPYGFVQSPIVAALCLAESALGVCLDKIRKTKGAVVSVYVDDIIVSSNDSSLCLSLLAMLKTAADRARFALNPDKEQGPASQVTAFNIVLSSSSMQIESARLQEFVEALAKATSQAQRKGILSYVSSVNADQGKAL

SEQ ID NO: 558 - protein, 253 aa, synthetic construct
  source 1..253: note = MG160-42 reverse transcriptase
VNPKWSSKSEIKPGRWVFVPTVEARDAGKALKKLIEDHWQPPAYYYHLRPGGHVEALRSHAGHTSFLRVDIQDFFGSINRTRVTRCLKPMFGYELAREWANASTVIHPDNKERSIIPFGFVQSQLVASLCLAESALGRCLEKLNKDPALSLSAYVDDIIVSSADAERCSAVLEELNIAAKRSRFTLHTAKQQGPATAISAFNILLSAEGLQVEAERLKAFEAALAEATSDAQRAGIIGYVSAVNAAQGESLGA

SEQ ID NO: 559 - protein, 250 aa, synthetic construct
  source 1..250: note = MG160-43 reverse transcriptase
MPAKWLNRFELKPGRWVYVPAPDARASGTAIKVEVERLWSPPDYFYHLQSGGHVAALRSHLGSSIFFKADVQNFFGSINRTRVTRCLKSKFSYKVAREWAVASTVQDPGSTNMTLPYGFVQSQLLASLCLSESALGRVLHRISRKDGAAVSVYVDDIVVSTRDAALLEKLHADVVLAADRSRFTLNPAKSTAPSPQISAFNILVSEAQMSIEPTRLAQFASALARGATPSQKQGILNYVNSVCPAQLGTL

SEQ ID NO: 560 - protein, 258 aa, synthetic construct
  source 1..258: note = MG160-44 reverse transcriptase
MWFETPWIHKFEVKPGSWIYVPSALTRNRGEKISQQVKNVWDAPDYFYHLNQGGHVKALKSHSNDNYFASIDISDFFGSISRSRITRALKRKLGYEKAREIAVASTVKHHILGQHSHSLPFGFVQSPILASVCLDSSALGERIKTCSTNKSLNISVYMDDIVISSDSKEELLTEFGLLKDAAKSSHFSLSIVKESLPSTSVVAFNIELSHRLLKITDGRYSQFIQAYRATQSIFEREGIVSYVRTVNYAQAKSLECTK

SEQ ID NO: 561 - protein, 264 aa, synthetic construct
  source 1..264: note = MG160-45 reverse transcriptase
MTLPWKDRFEVKPGRWVYIPTQETLEKGRQIKALVASKFQAPSFYYHLHEGGHVAAIQSHIDDRYFLNVDIKNFFGVINRSRITRSLKKRFPYAQAREITVQSTVRVVGESRYEYHLPYGYPQSTILASICLVDSALGRYLNSLSNQCNVSVYVDDIIISGNDPDELQQISDTLAEKSEVSRLFFGRQKAHQVSETITAFNIELSQHKTKITHQRYSQLLQQALLADNESVINGVLGYVRSVNREQHIEMHKELFTLGHIKAPA

SEQ ID NO: 562 - protein, 255 aa, synthetic construct
  source 1..255: note = MG160-46 reverse transcriptase
MPSLWKNKFEIKPGYWVFEPSEECRVIGNELKNIILGKWQPPDYYFHFQYGGHVAAAKSHFGNIFFLKLDLSKFFYSINRSRITRNLKEFFEYSTARDYAKSSTVRDPNNKYKFFLPYGYVQSLCLASLALSKSQLGTELNKIRKNNGCTISVYVDDLIISSNNIELLYKIKDVVIDSAKKSKFLINENKTEGPSTLITAFNFDISYNSVKINETRFYELLENHKKSDLMTQKEGIEGYVRSVDLNQYQFFMSLI

SEQ ID NO: 563 - protein, 258 aa, synthetic construct
  source 1..258: note = MG160-47 reverse transcriptase
MLPNYEHAFKNSNGKWIFVPTDESREQGYAILKEIHDYWEAPKYFYHLQTGGHVAALKAHQNKKFYVRADIKRFFSSISRNRIVSSLKKTGLFYKRSKEIADTSTVMSKETPHKKVLPFGFVQSPILASIALDHSAVGKFLRSDIVGVTRTVYADDFLYSSDDKEILQKTYLDLQKSISQSGFAINNGKSHAPQEQTCIFNVDITKNSLKISDSRYQEFTDEMFGMNRLRSEAIAHYVRTINLEQSNKLLSLFKNGSG

SEQ ID NO: 564 - protein, 245 aa, synthetic construct
  source 1..245: note = MG160-48 reverse transcriptase
MAVAIPNFEYSYRRKGKPVFVPTVIGRRIGKEVKSEVESAYNFDPIYYHLRCGGHVAAMHHHRDSLLFARIDISRFFYSISRRRVQSALDRVGIANARFYAKWSTVANPYGNPKYALPYGFVQSPILASLTIATSQVGDHLLGLPAAVSASVYMDDISLSSDDRGELERAYSATLAVLEADGFQVSADKLRAPAAAIDIFNCDLSHGRANVRDQRIAEFYGRGPDQISEEAFVAYCASVEDGNRP

SEQ ID NO: 565 - protein, 293 aa, synthetic construct
  source 1..293: note = MG160-49 reverse transcriptase
MLIDKFSKEIGLPRPSVQKIAASANYLYKHYTIPKRSGGERDIYHPTPRLKLVQRWITRHVIRDLPVSDAAMAYRKGKSITDNARLHAGKRFLLKMDFTDFFPSIKARDLQPILTSRGYDPEDVNFILTICFKSGSLTIGAPSSPAVSNIVMFALDQEFKGIADRRKLTYSRYADDLTFAGNVRGNLIEAKKDVERLIGTWASPNLTLNQRKTVLVSSAHRQKVTGITLTTDGEISIGREKKRELRAIVHRSTYQKLEPEVEAYVQGWLAYANSIEPKFVDSLRKKFDTYLDF

SEQ ID NO: 566 - protein, 232 aa, synthetic construct
  source 1..232: note = MG160-50 reverse transcriptase
VYVQTEKYKDFGRKLITKVRAKWTPPPYFFHLAKGGHVEAARLHIDSKYFAHLDLKKFFNSCRRSRVVRALKSIGFKQRQALECSSDSLVRLGGERVIPYGFTQSPILASICLHHSALGNEMACLHDEGKKVSLYVDDIVVSGDTEAEVEGLVDRLIKSAENARFALAHDKVSGTQPEITPFNLVLANNKLELSAEQYAEFKTRVAADPASAVAQGTIRYAGFVNPSQAATL

SEQ ID NO: 567 - protein, 558 aa, synthetic construct
  source 1..558: note = MG163-1 reverse transcriptase
MNIEEVQRRLWEQSRAHRQQRESGSPLFPANPYDDRIRKLMDLMHNPTWIAAACDRVLKRSRGKAVGVDGVRVRDFERSCEHRLEELRLELKRGTYQPLPLRRVEIPKANGKMRRLGIACLRDKIVQEAIRMALEPIFEAEFHRNSYGFRPNRSAHHAIAQCRNAALAGYAWTIEGDVKACFDEIAHKAILRCVREKVMDNKFLNLIDRLLKAGVEIDGVVHPTTKGVPQGGVASPLLANAVLNKLDWFLQSKGFYDAAKRRRSSHSLPNIRFCRYADDWCVFVTRCDRQYAERLKDEIRDFLRETCGLELSAEKTRITHVRDGYDFLGFNISVGVGQSGKMVPKVKVGRKAIANIQRRLGESLRYRPMQESISVRLVRTSAVIRGWSNYFKAAHNFSRVAHGLDHKAFWITAKAICRKEDISTAKCFRRYRLGNKIGVHEACTLARFQETASSYYYAAPKPYQPGCNRYLDDHEWEAALVLSEHARPGSGDLKWKALVRDGFHCRGCAVVVSARTSHADHIRPVNSFANLELANDLDNIQTLCRWCHKQKSARELCA

SEQ ID NO: 568 - protein, 564 aa, synthetic construct
  source 1..564: note = MG163-2 reverse transcriptase
MYPTKMAEKQAKLAETALSNPEHRFHNLYDLMHWRYWIEEAAAKVLARPGSSTAGVDGKTRVDFEKNYATEISRIVTELKDKTYAPQPVRRMHIPKGNGKTRPLGIPILRDRIVQEALRAILDPIYESDFQHHSYGFRKGRCTMDAVAVLMPLFNTQVKHYWVIEGDIKSYFDNVHHRKLMKLLRQRIADKALLDLIWKFLKAGVMEGRLFACTETGVPQGGVISPLLANVYLNEFDKWAERQWHNLTPYDRQRRRQAGLGNYTMVRYADDFVIVSNGTRAEVERTKEAVRRFLAEELHLELSAEKTLITHVNDGFDFLGFHIQRCKPEGRWVVHLRPTEKNKQRIKHRMKELTSRNWTWMDEYTRLTALNRIVKGWCMYYRYTSLHSDLEEITRYIWFRYLQWLLRKHKGSRKHQLIQEKTAVIHNRTRWTATVAQDGQAITAHQWLPTPKELKRERYRLKGRGGFAHPYLEPALDTTDNPEWEGGPAEVLFTEVIGARSRRGEPLEMAELKLRRKLRDRFTCQHCGSREHLQVHHVGPVTSTSIDDLITLCLKCHQQQHRQN

SEQ ID NO: 569 - protein, 509 aa, synthetic construct
  source 1..509: note = MG163-3 reverse transcriptase
MIISEMQHKLATWAESDPNRRFDRLLRLIANKEWLAEAARMVLASSGARTPGIDGMDKQRLQVKLDQHLDDLRASLLEESYRPQPVKRIYIPKSNGKLRPLGIPTLTDRIVQRAMLMAMEPIWESDFHRLSYGFRPERSVHHAVRTVRIQLQDGADTTRGRWIIEGDLASYFDTVHHRLLLKCVRRRVQDGRFVDLLYRFLKAGHIDRGLFTASSEGVPQGGVLSPLLSNIMLHEFDMWLEAKYLNKKARKDRWAWNFGIQQGRPITVRENRQWKPAVAYCRYADDFVVIVKGTRAQAEEIREECRAFLEGKLKLTLNMEKTHVTHVDDGFVFLGHRIIRKRGAHGRMSIVTTIPKEKAKGFVRRLTETLSGNHSVSTVDMIAGLNRQLVGWAAFYKFTDFTAYVFRRIDHVVFWKLAHWLGHKYRSRIKPLMRKWFRVPEPGKAKTWLVFGRNERGDPVGKALHRLVSSPKAQFRWRNPEENPYIFRLEDRSTVTSHYHDVAMAMGQA

SEQ ID NO: 570 - protein, 507 aa, synthetic construct
  source 1..507: note = MG163-4 reverse transcriptase
MQNKLATWATESKERKFDRLLRLIANRAWLSEAASITLASSGARTPGVDGINKHKMEEMLDLELGNLRYELLTGTYCPRPARRVYIPKANGKLRPLGIPCLRDRIVQRAMVMVMEPIWESDFHPQSYGFRPARSVHHAIRTIKMQLQDGNERTDATAGRWVVEGDLASYFDTVHHRLLMKSIRKRISDRRFLTLLWRIIKAGCVDRGLFRASSEGVPQGGVISPLLSNIMLHEFDQWMEAKFLSKKVRKDRWAWNFGIQNERPIAIRENRQWKPAISYCRYADDFVVVVKGTKAHADEVRETCRAFLEDRLKLTLNMDKTHITHVNDGFIFLGHRIIRKRGAKGRMRPVSSIPWDKYRRFTERVVKQLSGNFSMNTMDLVESLNRQLVGWANFYQYTDHTVTIYGKVDRTVFWKLGYWLARKYKRGFRSLMRDYVRSPEKGKAKIWVLQGQNSRGFYGELALKRLVTSHKGWFTWRTPAENPYTLRSEKPRTIQSYYDDVAFALSNA

SEQ ID NO: 571 - protein, 507 aa, synthetic construct
  source 1..507: note = MG163-5 reverse transcriptase
MIISELQRKLATWTACDKTRRVNRLLRLISHHEWLYQAAQITLSSKGAKTPGVDGITKIHLQTNLHTYLAQISDDLRSGHYQPMPARRIYIPKANGKQRPLGIPTLRDRIVQRAMLMAMEPIWENNFHSLSYGFRPERSVHHAIRTVKLQLTDGRTSRGRWVVEGDLSSCFDTVHHQLLMKCVRKRISCQRFNHLLWQFIKAGHIERNLFCATTEGVPQGGVISPILSNIMLNEFDQYLNECYLGKKVRKDRCNWNSSITDKRPIASKENRQWKPAVSYCRYADDFLVIVKGNKQQAEAIRDQCRDFLEGKLKLTLNMEKTHITHINDGFVFLGHRLIRKRGVKSNMRVVTGIPLGKAKAFSHSLSQALSGDHSCSKIDKVEQLSRKLKGWAQFYRHTDFTSKVYNKIDRIVFWKLAKWLASKYRCSIKSLMIKWIKRPKANKAKTWVLFGKSNRGNLCEVSLFRLVSSPKLPFRWRLPELNPYLRDEIRKTVTSSYRDVAMAVSHN

SEQ ID NO: 572 - protein, 618 aa, synthetic construct
  source 1..618: note = MG164-1 reverse transcriptase
MTKQKKLRHLEYYDLQERFDELFAKSKQGELFTNLMELISSEENIKLAYRNIKRNEGSNTSGVDGKTIKDIERVSADKLVEVIQNKFRFYKPKPVRRKEIPKPNGKTRPLGIPTIEDRLVQQCILQVLEPICEAKFHERNNGFRPNRSAEHALAQCYRMIQIQHLHFVVDIDIKGFFDNVNHSKLIRQIWSMGIRDKKLICVIKQMLKAPIIMPDGTTIKPDKGTPQGGILSPLLANIALNELDWWISSQWETMPTHTQYKPHISKNGTISCANKFRVLQESKLKEMYIVRYADDFKIFCRKRSDADKIFVAVKKWLKERLKLEISEEKSRVVNLKKKCSEFLGFELKAVRKAKKYVVQSHISEKSKKRVTETLHKKIVEIEHSKNAKELGIHVRQYNTVVFGIHNYYRVATHISCDCSAIYNTIRKAIYNRLRGQLKSKGVIHSAFIQKNYGKSKMICFLGDAPLIPFSYVQTKTPRYKKVKICKYTPEGRSEIHKCLKFDESVIAVLHMLAKSHMNGRSVEYMDNRVSLYAAQYGKCAVTGKVLWIDEIHCHHKKPVSQGGTDEYKNLIIVHVNAHRLIHATNPETIMVYLNKLNLTKPQLKKLNKLRTMAGNPAI

SEQ ID NO: 573 - protein, 632 aa, synthetic construct
  source 1..632: note = MG164-2 reverse transcriptase
MTSRNKKRRKLRNAEYYDIQSLLDKLYADSKNGKVFTNLVELICLPRNVELAYRNLKKNSGSKTAGVDDKTIDDLAGLTNEQITDYVRTRLNYYKPHRVRRIEIPKKNGKMRPLGIPTIYDRLIQQCILQILEPICEAKFYPHSYGFRPNKCCEHAMARAYKLAQNHKLHHVVEVDIKGFFDNVNHGKLLKQMWTLGLRDKKLICIISQMLKAEIAGIGVPTKGTPQGGILSPLLANIVLNELDWWIASQWETFPTRHQYRSDVVREGKPGINHGHRYRAQRESNLKECYIVRYADDFKIFCRNKVDAERIFQATTQWLKERLFLEISPEKSHIVNLRKGYSEFLGIRFKLVAKGKEKDGKPKFVIRSHICDSAVEKIAEKMYVEISNLAHCADNRQLHVVVDNINLYVLGIHQYYQMATHIVTDLNPINRSVLSRLEHKKNLKCLLTEQGNAKLPKYVVQKYSASKCVRYIKGRALIPIGYVQTKPPMFSISGVCKYTAEGRSLIHNNLQTINISTLHYLMNHPNKNRSIEYNDNRLALFCAQNGKCAITGKVLEIGDIHCHHIVPIHAGGTDKYQNLKIVCVDIHKLIHAVDERTIRGLLEKLELTAYQIKRLNYLRKMAGNQELQTKAA

SEQ ID NO: 574 - protein, 645 aa, synthetic construct
  source 1..645: note = MG164-3 reverse transcriptase
MKLSIPKSEEEFQKLKDKLFEETKTALSQNKTPIFKNILEVAQCDVVILTAIHKLKGNKGSNTAGVDGETMRMDILNKDFNKVMKEVKLQFTHYTPDKVRRVHIPKSNGETRPLGIPTIADRVVQECIRSVIEPICEAQFFEHSYGFRPWRSTENALGRITDVVQKTGYHWIIEGDISKFFDKVNHTKLIRILWSFGIQDRRILMMIKAMLQAGIMEEINKNELGTPQGGIISPLLANVYLTPFDNFVTREYENKKLRKNYSSGQRSLILRGLSGKPRIKPIPCYLIRYADDWVVITNSKKNAEKLVYKYEKYLRETLKLELSASKTKITNVRSKAIEFLGYKYKQVRGKATKGYISRTKPIEEQLDKKITELLKDIKRLKKCKDTETLISDINIINSKIRGLVNYYQVTTWGSESMKKYNQRVRWAAFRAIRRRIGAKSAKGKNKKVDWVRANLCANLVGIHSNYTTALPSLKYKEHIVGVTDLAFIKFRQPVLLNQKETPFTQEGRERHLARTRKRPPQYRLDFIFGADATTTKRLLASRKRKNRLYNFEFYLNRAYAFNRDKGKCRICGKEIAPHEIQTHHVDPSLKTELVNKVSNLASLHDTCHNNMHNLTLTEQLLQAKGYTNTAVKKILNFRNKLAITL

SEQ ID NO: 575 - protein, 606 aa, synthetic construct
  source 1..606: note = MG164-4 reverse transcriptase
MTLNTKGKRAEYHDILPLQNELWENDTPKNLYKLITSKRNIICAYDCLRRNTGSHAKGVDGLNIEDINHVSLDRLIKTVRAKLLDYKPDPVKRVYIEKDNGKFRPLGIPTIWDRLIQQCIKQIIEPICEKQFAHNSYGFRPKRSQENALADVMKSLNLSKHRYIVNVDIKGFFDNVNHKILINQLWSIGIKDKSVLQIIKKMLKAKILEPNGKLMTPSKGTPQGGILSPLLSNVVLNDLDHWVNDQWIECGIETPSITIHWNKNGSPGGDKYRHLRKFSTLKEGRLVRYADDFVITCKTYNEAVRWSHAVTNYLKRRLKLEVEDSKSKIINLRKKYSDFLGFKFKLKKKRNKWVAESRISDKKKKKILASYRQQIRNTWSGAEIYKLNTKTFGLWEYFENATAVSVDMSEIAWRLSKIIYNHFSMNGEFRYLTEAELKSTGVGIKMTKLQNHCKVWVQHGVPVMPLSMGKTRYPLCKRRQEKPYEFTREKKDWQSYIILIESNITSSTLFHINKVSKYAQQKGKCAILKQFTGLDFHCHHIIPRYLGGDDSYENLIVLDRRVHNLIHARYDWKIKEMIKELNLNKQQIAKINKLRNQCKLNEIEID

SEQ ID NO: 576 - protein, 636 aa, synthetic construct
  source 1..636: note = MG164-5 reverse transcriptase
MAKRIVNKAERNAERYDAKEMGYQLYEDSLNGRVFDRLMPMIISEQNIILAYRNICKNNGSKTPGTDGKTIVEIQELPIEMVIKTIRNKLNYYQPKKVRRVEIPKDNGKTRPLGIPSIWDRLIQQCVLQVLEPICEAKFHERNNGFRPYRSTQNAIAQCYKMAQLQNLHFVVDVDITGFFDNIDHSKLIRQLWGLGIQDRKLIMIIKQMLKADILFNDIVITPETGTPQGGILSPLLANVVLNELDWWVANQWEMFKIKEGSTGYEFAKVDKEGNVLTVDRTQKWNKLRAKTELKEMYIVRYADDFKIFCRDYVTATKVMYATKLWLEENLHLQTSDEKSGITNLRKNYTTFLGIKFKVVPKGNKWIIRSHMADKSKAKVISKLSSVWKDIKNPSKQSELDKNINLYNAMVMGMHNYYCMATLVSADFAEIAFKVTGKSNGMNHNRWCFPIEKQGEITSKYILEKYGKSKQFRWINGRMIVPIGYVAYEYPKYKRREVNKYVRKYSDAENCISFEVMKYMMENAHLYPTLEMADNALSRYIAQKGKCAVTHNALTVVDMVCEHIKPCKGERNDTYRNLIILSKEVSDLVGAENSNKIDKILKNLLLTKEMQDKINKLREHRELEPIQFDDYIGTKK

SEQ ID NO: 577 - protein, 424 aa, synthetic construct
  source 1..424: note = MG165-1 reverse transcriptase
MDGSKLKVKSFEIPKRLVYEAWEKVRANKGAPGVDAVSINQFAAAEADNLYKLWNRMSSGSYMPGAVRAVEIPKDHGLGVRTLGVANTADRVAQTAAAMLLEERLEPIFHPDSYGYRPGRSAHDALAVARKRCWSQDWVIDLDIRAFFDSVPHDLLLKAVAHHTEERWVLLYIERWLKAPMQMPDGTLVARERGTPQGSPISPLLANLFMHYAFDRWMARDHPGCPFERYADDIVAHCDSKEQACSLLAAIAERLGAVGLELHPDKTKIVFCKDANRPGTSEHTSFDFLGYTFRGRLAPGPRGYFVSFSPAMSTKAKKAVGQKVRAWHLNRRTGTDLSGLAEDINPHVRGWINYYGAFYRSELHSLARRIDEHLVRWAMHKFKRLRGKPSRAWDWVAAARQRQPKLFAHWHLVSSTRGRLVGAV

SEQ ID NO: 578 - protein, 413 aa, synthetic construct
  source 1..413: note = MG165-2 reverse transcriptase
MAKSFNLSKFAVWDAYLAVKANKGSAGIDGQTMEDFESDLKCNLYKIWNRLSSGSYFLPPVRRVEIPKSNGTLRPLGIPTISDRIAQMVIKKRLEPLVEPHFHDDSYGYRPNKSALDAIAQTRRRCWRDDWVLDMDIQGFFDALDHKLVMIAVSRFTQCKWTMLYIERWLKADVVMPNGERVKRTQGTPQGGVVSPLIANIFLHLGFDSWMQKEFPCIHFERYADDIVVHCRSQKQLEYIGQMIKSRFAQCKLSLCQEKTKIVYCKDSKRLGTYSSQSFDFLGYTFRPRSCRDKEGKFFVSFTPAVSRKSMKAIRLKIKEHPMVKGCFSQGISELARAINPMIQGWINYYGHFRKSEMSTIYDYINEKIMKWAMRKFKHLQRRKKRAGQWLRKLYSKAPLLFAHWRIWKWVAE

SEQ ID NO: 579 - protein, 434 aa, synthetic construct
  source 1..434: note = MG165-3 reverse transcriptase
MSTELERISKLAGENRQLKFLSIAHLLTPEALMEAFKSLRKDASAGVDGVAYGEYRMEAGRRIQELYERVRGKRYRAQPLRRIYIPKEGGKQRPISIPTVADRIAQTVVTMVLEPEVEPRFHPDSYGYRPGRSALDAVGKARERCWRYDWVIDLDIKAFFDSLDWDLVERAVAHHTELAWVRLYIARWLRAPVQKPDGTVELRTKGTPQGGVASPLLSNLFLHYAFDMWMQRSFPSVPFERYADDAIVHCGSERQAKMVLSAIRDRFAECGLELHPTKTRIVYCQDSDRLGKYEHVSFDFLGYTFQPRRAKNHRGKFFVSFLPAISTKAAKAIRATIREWRLASTRNNQSLEDLAQLINPVVRGWMNYYGRYYRSKCVQVLRHVNLALAAWARRKYRRFKRRERESLHWLGRIARRDPNLFVLWRLGIRPEAGS

SEQ ID NO: 580 - protein, 415 aa, synthetic construct
  source 1..415: note = MG165-4 reverse transcriptase
MNEAKPFVVEKRVVMESWLQVKANRGSAGIDGIDLKSYESNLQKNLYKLWNRMSSGSYFPKAVKLVEIPKPNGGKRPLGIPTVEDRVAQMVVVMYIAPRLEAIFHDDSYGYRPMRSAHSAIAKAIERCNENLWVLDMDISKFFDTIDRGLLMKAVQKHVSEKWILLYIERWLKVPYQTSDGGVVDRMMGVPQGSVIGPVLANLFLTYVFDLWMKHYFPTIPFERYADDTICHCRTEKQTQYLKACLVKRFADCGLKLNEEKTKIVYCKDSNRKGNSEHTSFDFLGYTFRPRKAKNSKTGQIFTAFSPAISKKSMMKIKTEIRSWHLNRQTHLSIEQIAERINPIVSGWMNYYTRFGKSEFWKVMSYLNERLSRWVKRKYKRFRTKLSKAYDWLVECAAHNRHMFSHWMSGYIPHS

SEQ ID NO: 581 - protein, 416 aa, synthetic construct
  source 1..416: note = MG165-5 reverse transcriptase
MIQTKSQDITKRQVWEAYKKVKRNKGSAGVDGVDFETFEANLENNLYKLWNRLSSGSYMPPAVLRVEIPKSDGGVRVLGIPTIADRVAQMVVKDYLEPKLEKIFHNDSYGYRPKKSAHQALETTRKRCWQYPFVLDLDIKGFFDNIDHELMIKALELHMDTKWEMLYIKRWLVAPVQTKEGLQQRERGTPQGGVISPLLANLFLHYAFDVWMRKNYPTIPFERYADDAVCHCRSQREAQQLKADLSQRMEACKLELHPDKTKVVYCKDDKRRGEYENVSFDFLGFTFQPRVAKNSKTGEFFVGFNPAISTKAAKRIRLVMRRWKVQLMSHLSLEELSDRLSRVIRGWVNYYSIFARHKLLDVMRYFDRRLERWAKRKFKSLKRRQGRAHKWLMRIARKEPNLFPHWQMKYAKLTVR

SEQ ID NO: 582 - protein, 410 aa, synthetic construct
  source 1..410: note = MG165-6 reverse transcriptase
MHDISKEEPFRAWERVKKAGGGAGYDGKKIQDVQLDLDNQLYKTWNRLSSGSYMAAPVLLVEIPKAGGGKRTLGIPTVMDRVAQMVIKDRLEQILEPKFHKDSYAYRPDKSAIDAVGKARERCFQRKWVIDLDIKGFFDNIDHSMMMEFLLQHTKDKTIVMYVQRFLTAKAIKDDGTTVERTKGTPQGGVISPLLANLYLHEAFDMWMKEHLPNVQFERYADDVIAHCATEKQAQDVLEEIRERLLLYKLELHPEKTKIIYVGSGKDPENKPPRKFTFLGYEFKPRGYVKDKIWHMTFTPSIGAKALKAIQIKMDEWSLHSRTFSKLSDISQEKSAIIRGWIEYYGHYRRSELYKLAIRIDWKLVRWLKRKHKSLRSTDKAWQALRSVKKGWPKLFPHWHMIPTPPTRAV

SEQ ID NO: 583 - protein, 409 aa, synthetic construct
  source 1..409: note = MG165-7 reverse transcriptase
MIDYYETKQHPVTKKMVLDAYKKVRENKGSAGMDEQTLEDFKLKASTNLYQIWNRMTSGSYYPNAIKQVLIPKKSGGTRSLGVPTVSDRIAQQVVKSYLEAKVEASFHQDSYGYRPNKSAHQALDVAKGRCSYYSWVLDIDIKGFFDNIDHELMLKALKRYTQEKWILNYVERWLKVGVFNGNEVESREKGTPQGGVISPLLANIFLHFAFDMWMLKIYPHVPFERYCDDVIIHCSGKEQALLMKMAIAKRMKECKLELNEQKTQIVYCRNQIHKEKYEQVSFDFLGYTFRPRYCPTKKGLSLLFTPCMSTHSKNDVREKIRKVINRSFKGSVQQLAQMLNQKVRGWFQYYCQYNKYTTVGLWYWLNAKVINWVMENRHFGMRRAVRWLKTIYSTNPDMFIHWQLSHPW

SEQ ID NO: 584 - protein, 417 aa, synthetic construct
  source 1..417: note = MG165-8 reverse transcriptase
MIFKEQTKSVPITKEMVWESYKKVKSNGGSAGIDQQSLSEFDRVRSKELYKLWNRLASGSYFAPAIKRVTIPKAGGKTRPLGIPTVSDRIAQQVVKTYLEPRLESVFVDNSYGYRPNKNAHTAIQSVQQNVRRYSWVIDLDIQEFFENVNHELLLKALERHVSEKWVLLYIKRWLEAPVILEDGAVKVSTGKGTPQGGVISPLLANLYMHYCVDKWLEKFHPSVIMVRYADDLIIHCSSYQEAVRTLTDLKDRLEKCGLRAHPEKTKIVYCKKEGRNLNDYPVQFDFLGFSFQPMRNRLRNGGSFLQFDCKMSRKSKVRINGELRKLNFHNKTQRGIQDLAILLNPKIRGWVQYYGKISRRSLKPVFYYLHHRLIRWILNKYKSFKGSKVKAVKWLRQVTVSYPNLFYHWELGYKLV

SEQ ID NO: 585 - protein, 414 aa, synthetic construct
  source 1..414: note = MG165-9 reverse transcriptase
MTGKSYDIPKTLVWEAWLRVKANRGAAGIDAETIERFETKLAANLYELWNRMSAGSYFPPPVKAVPIPKKSGGVRVLGVPTVSDRIAQTAVKMWLEPRLDPLFHEDSYGYRPGKSALEAIAVTRRRCWDRDWVVEFDIKGLFDNLDHGLLMKALRKHCEEPWILLYVERWLTAPMQSADGRVQTRFKGTPQGGVVSPLLANLFLHYAFDTWVARHLPGVRFARYADDAVLHCKSRRQAEYVLDRIRERFPACKLELHPGKTRIVYCKDVNRTEDNPDIQFTFLGYTFRPRRAADKYGRIYVNFSPAVSRDALKAMRQTIRGWRVQLKNDKSLADLSAMFGPILRGWRQYYGRFHGSALESVWRRMNRALIGWLMRKHKKLARRKLRAAETLERMAKRQPRAFVHWSMGYLSSVG

SEQ ID NO: 586 - protein, 492 aa, synthetic construct
  source 1..492: note = MG166-1 reverse transcriptase
MMHGLEKSDLAVVAMKPANNAGSPAAEWVEPRAGTNGNADPPRTRRTQSRDSVSQGLERVRQAAMQRKRQAFTALLHHVNVDALREAFLALKRRAAPGVDGMTWQDYESGLEEHLQDLHARVHRGTYRALPVRRRFIPKPDGRQRPLGIAALEDKIIQRAVVTVLNAIYEEDFLGFSYGFRPGRGQHDALDALCVAIKGKRVNWVLDADIKGFFDAVDHSWLLRFVRHRVGDERITRLVGKWLMAGVLEDGHWSASDQGTPQGAVISPLLANVDLHYVFDLWAQQWRRREVKGDMIIVRYADDLVVGFEHEAEARRFWDAMRVRLEQFSLELHGEKTRLLEFGRYAIERRQRSGQGKPQTFNFLGFTFICGRSRRGAFLLRRHTRRDRMRAALRELKDEMRRRRHDSLTDQGRWLRSVVAGYFAYHAVPTNAHAIGAYRHHVIDLWRRSLRRRSQKDRMTRARMDRLAAEWLPPPHVLHPWPEDRFAVKHPR

SEQ ID NO: 587 - protein, 515 aa, synthetic construct
  source 1..515: note = MG166-2 reverse transcriptase
MQTALWESDQPIVPKKRGNARGGKELAGARWTGGEPPPIPRDGHGVSPKLRSITLRAREDPTCKFTSLAHLLTADFLTECFRELKKNKAPGIDGVTVREYEAKLDENISDLVARLKAKQYRPQPVKRVYIPKPNGERRPLGIPAIEDKIVQMALKKILEAIFEVDFCEVSYGFRPNRSCHDALDMVDTTIMTQPVNYVVDMDIAKFFDTVDHECLMECLRQRIADPSLLRIIARFLKSGVMEDGVFQEIDRGTPQGGILSPMLANIYLHYALDLWFEQEVKKQLSGFAQLVRYADDFVVCFQYRSDAEAFGAALRERLAKFELKISEEKSRIIAFGRSACQQARKQGKKCATFDFLGFTLYCDKDRNGNFKVGRKTASKKFRQKTKEMNQWLKGTRNRVKLGLWWPLLGRKLVGHYQYYGISGNIKGLQSYYHHTVRLAFKWINRRSQKKSYNWSQFNKFLARNPLPKPKIYHFYALSKRRGCAPEEPDEGKLHVRFCEGAHSHLGASTPTRGRL

SEQ ID NO: 588 - protein, 448 aa, synthetic construct
  source 1..448: note = MG166-3 reverse transcriptase
MQPVKETSTGHVGSGKCWQTSLRGIAKKATENKTHQFGNLYQLLNKESLREAFYDLKKKAAAGVDKITAEEYAKELESNLGELEEQLKSKQYRAKLVRRVYIDKGNGKKRPLGIPAVSDKITQRVAARMLEAIYETEFSAHSYGYRPHTGAQKAVKDLTKELICGKYGYVVEADIRSFFDAIDHDWLIRMLEVRIADKAFLRLIKKWLKAGVLDTDGMVKHPVTGCPQGGVISPILANIYLHYALDLWFEKRVQQSCEGMTYICRYADDFVCAFQFKQEAVKFYKELGERLEKFGLELAQEKTNIIIFSRFRQEDKTKFEFLGFEFRWGVSRKGKAIIKRRTAPGKLRKSIIAFTEWCKKMRSKRLRKLFPKLIAKLRGYTNYYGLIGNFRSLSKFYEHVKRIFYKWLNRRSQRRSFNLAEFDACWERYGVPKPRIVESDLVQLHFDF

SEQ ID NO: 589 - protein, 439 aa, synthetic construct
  source 1..439: note = MG166-4 reverse transcriptase
MSGSPNLGSISTRLRRIAQLAREDPERSFMSLAHYIDEYWLQEAYSRTRKDGATGVDGTTGKQYGEQLGDNLRSLLDRFKSGQYQAPPVKRVHIPKGTGDQTRPIGIPTFEDKVLQRAVAMLLEAIYEEDFLACSYGFRPGRSAHEALRDLWRELMGMGGGWVLEVDIRSFFDELDHGHLRGFLDRRVRDGVIRRAIGKWLQAGVLEEGHMRHPVTGTPQGGVISPLLANIYLHEVVDRWFEEEVKPRLGGRAVLIRYADDLVIALAEEKDARRVEEVLPKRLARFGLQLHPDKTRLVRFQAPRDEEKPPRSEGPGAFTFLGFTHYWGKSRKGNWVVKRKTAASRFTRSLSRVRQWCRRCRHEPVAWQQRQLSRSLRGHYAYYGITGNFRSLTNFHRQVTREWRKWLNRRSQKARMIWERFNRLLVEYPLERPRIFHAI

SEQ ID NO: 590 - protein, 491 aa, synthetic construct
  source 1..491: note = MG166-5 reverse transcriptase
MMHGDGKSDRPVVPGKPPNKDGRRGPRDHGVPYTGTKAEAPDTAKGTPTEAKARGGPTAEGVARRDRKLRFTALLHHVYDPEMLREEYFCLEREAAPGVDRVTWRQYGEALEDNLHDLSARLKRGTYRAKPVRRVFIPKADGRPRPLGVTALEDKLVQRATVEVLNAIYETDFLGFSYGFRPGRSQHDALDALYTGLLTKKVNWVLDLDIRGFFEAIDHGWLVKFVEHRIADRRVVRLIQKWLNAGVLEDGKRTRSEQGTPQGGSASPLLANVYLHSVFDLWVQRWRRTQARGDVVVVRYADDAVVGFQNESDAKRFRAELAERLSEFALELHPDKTRLIEFGPYAASNRKRRGQGKPETFDFLGFTHICGKKRSNGRFTVLRQTIRKRLQAKLKQVKTGLRRRLHDPVPEVGRWLRSVVGGHVRYYGVPMNGPALHLFRFQVGRLWYRSLRRRSQKARLTWERMRRLIDRWLPPARVCHPYPLRRLGVIT

SEQ ID NO: 591 - protein, 441 aa, synthetic construct
  source 1..441: note = MG167-1 reverse transcriptase
MNLSTPESVQKLQTALHTKAKESPDYRFYCLYDKVYRADVLAHAYHCCRANGGAAGVDGQTFESIESGGLDTWLGELAKELRDKKYRPEAVRRVYIPKPNGSKRPLGIPTIRDRVAQMAAVLVLEPIFEADLEPEQYAYRRDRSALDAVKKVHSLLNTGHKEVIDADLSGYFDSIPHAELMKSLARRISDRHVLHLIKMWLEGPVEESDERGNKHRTTRNKDEGRGTPQGAPISPLLSNLYMRRFVLGWKALGHSKRLQAHIVNYADDFVICCRGTAQSAMQTMTDMMVKLRLTVNEAKTHVCRVPDESFDFLGYTIGRCWSTRTGQPYIGTRPSKKRIARVCETISELTSRRWLLLDVDERVRRLNRTLIGWANYFCLGPVSKAYRAVDAHARYRLRQWLRAKHKVRGAGTAQYPDEYLYATLGLVELARRTRDFPWAKV

SEQ ID NO: 592 - protein, 436 aa, synthetic construct
  source 1..436: note = MG167-2 reverse transcriptase
MIKASVGLQDLRRRIYVKAKAEPSWRFWGLYVHVCKMEALFLAYEMAKKNDGAPGIDGVTFAAIEAQGVAAFLEQIQDELIGRTYVPLPARKQEIPKDGGKVRILSIPAIRDRVVQGALKLILEPVFEADFQAGSFGYRPKRAAREAVSRVAQAIAQYKTRVIDLDLRAYFDTVRHELLLKKVAQRINDNDVMHLLKVMLKASGKQGVPQGGVISPLLSNLYLNEVDRMLERAKVVTRSGQYTYVEYARFADDMVILVDAHRRHDWLMKAVEKRLREEFAKLQVEINEEKSSIVDLSRGESFGFLGFDFRRTRSLKGVWRPYYAPKLKKRTALLQKLKEVFRSHQSQPVDRIVHLINPILRGWVNYFAIGNSSQCFNYIQDWVEKKIRRHLMRSRKRRGFGWQRWSRQWLYGGLGLFDGYRVSRAWSKATSAEQVS

SEQ ID NO: 593 - protein, 429 aa, synthetic construct
  source 1..429: note = MG167-3 reverse transcriptase
MQELPNIDRIREFQRKLHEKAKADPKYRFYSLYDKAYRMDILEEAYRKAKANGGTSGVDGETFDDIEAKGVAEYLTVLQKELKEEQYNPKPVRRAYIPKPNGKKRPLGIPTVRDRIVQGAFLLILEPIFEADFCDSSFGFRPEKSAQDAIREIYKYLNWGCEKIYDVDLEQYFDTVEHWKLMKLLALRISDGKVLHVIKQWLSCGYVEDGQHRQSKRGTPQGGVISPLLANVYLNPVDRAFERNGIGTIKQGSIHLVRYADDMVILAQKNLEKGITLLDSYVDKLGLRLNKEKTRRLDLPTDKKVKFLGFQFHRVTNRKTQKRLILVSPSPKSLKRCREKVKTLINHSNPMAVREQIERLNKYLSGWTNYFRLGNSAHALHQVRYYVNQRVRRLIQRHKGREGYGWKNITSADLYGRLGLFCDYKVRWL

SEQ ID NO: 594 - protein, 465 aa, synthetic construct
  source 1..465: note = MG167-4 reverse transcriptase
MSNRLDQPANVNESDHERTRLRARDVVRDEGISSLQALQRVLYRSAKQDPTRRFHALYDKLTRSDVMWQAWINVSTNQGAPGADGVSIDAVTAGGYEGVTSFLDELSTEVKAETYRPLPLRRVHIPKAGKSGETRPLGIPSLRDRVLMSAAKLILEPIFEAQFSSTSFGFRPKRSAHDALEVIRQSANSGAHWVLDADIKSCFDEIDHEALMALIERRVSDRAMLKLLRSWLRAGIIEGGVYSDSDSGTPQGSPISPLLCNIALSVLDEALAKAKSQTGSVVRYADDWVVLCATKKRAETARSIAEAALAPLGLRLHPEKTRIVHLTRGTEGFDFLGFHHHMVESWKWPGRYYLQRWPSDRAMASIKVKVREMTDRRYVGLSLDDVVDRLNPVLRGWAGYFRRGNSSRKFNVIDSYVAERMAILASNKYGLSGRNWGTRFSYEWFKSLGVYALSGKVISRTAHAQ

SEQ ID NO: 595 - protein, 455 aa, synthetic construct
  source 1..455: note = MG167-5 reverse transcriptase
MQPLDPEVHYGISDRCYLDRHEVPMDLLPDKLHQLRWKLLQKAKKEPKFRFYALYDRVYRIDVLEAAWKHVGKRGKACGIDGVRAEDILERENGVEDFLATILDELKSKTYRPSPVKRVYIPKADGKKRPLGIPTLKDRVVQMAVVLILEPIFEADFHDCSHGFRPGRKAHDALDAIRENLKAGRTEVYDADLKGYFDTIPHDKLMACVRMRVTDRSVLGLIRGWLRAPIIEEDDKGNRQPPLKSEQGTPQGGVISPLLANLYLHWFDKVFHRPDGPGTWANARLVRYADDFVIMARYQSARIDEWISHRLEDWLGLTINREKTSVVRLKRGESLDFLGFTFRYDRDLYGGTHRYLNVVPSKKSLKKARDAIREKTGPKMCYKPTPAVVRDLNTYLKGWCGYFKYGYPRKSFRDLGQYCRCRMTTHLNRRSQRKYHRPKGMSSYQYLQEIGLLRP

SEQ ID NO: 596 - protein, 567 aa, synthetic construct
  source 1..567: note = MG168-1 reverse transcriptase
MNTPTEWCRMQVSELQRRLARKATDKPEHRFTKLYDLLTWEPLMAWAFDKLMTNAGSRTAGIDRMDKRKALHNRDLIIAELRVALKSGTYKHQPVRRVFIPKANGKRRPLGIPTLTDRMVQMMVKAILEPIFESDFRPESHGFRPQRSCHTALAHLHQLTAPRQKKMNWVIEGDITGCFDHIQHTTLTRLLRRRLQDHKLMGIIWQMLQAGVMEGTLFTTTSEGTPQGGIVSPLLANIYLHELDLWFHQNYTGLNYNEKNRRRKRKEGNAFYVRYADDFVVAWNGTREGAEQLKAALTTFLREHLGLELSAEKTRITHVTDGYDFLGFTVKRYRNRSGGSTLITRPSEKSVMKLKVKIKTMTKHGTTRDAVRDKITAMNYLTRGWANYFRHSAASGTLRYVSHYAFKRVEIWLRAKTRQGSKAIYGSYYRRDPHGHLTWSAGGQHLHLPTYTKIERLRYAHRPNPYLTEPEVSPLTHNEAPFGTKEWGGAHYYGEGWTEIRAAVLERDERTCRTCGKKGKVEVHHIRPWKPGMAHELTNLITLCGTCHRQVRDPKSEVNRQLARMTP

SEQ ID NO: 597 - protein, 518 aa, synthetic construct
  source 1..518: note = MG168-2 reverse transcriptase
MDMDRQADEAWILSVQSKLYQWSQANPGDQWRDMWSWLTDIRTLRCAWQRAASNRGARTAGVDGMTVGHIRANKGEQRFLEKLQAELRSGAYRPSPSRRILIPKAGKPGQFRPLGIPTIKDRVAQGAVKLLLEPIFEAQFWHVSYGFRPGRSSHGALEYLRRAALPQKRDQDNRRSRLPYPWVIEGDIKGCFDHISHHHLMNRLRARVGDHRVTRLVVLFLKAGVLAEDQFLRTDNGTPQGGIISPLLSNIVLSAIEERYERWAYHRTKLYPHRKRDGVAAAASARGADRKAGRCVFLPVRYADDFILLVAGTKEDALAEKSALADYLLETTGLELSPEKTKVTALTDGFEFLGFRFGAHWNKCYGFGTRVEVPKAKAADLRYRVKQLTRRNTTLVSLGEKLKEINPILRGWANYYRYCAYAGDVFTSLDWYVGDRIWHWLRYKRPKASAHEILASRRPSQLRRTRKVWQDGSTEQFLLSLTPVCRYRLAWLGKPNFAMSSGEPDAERKSQVRFGKRR

SEQ ID NO: 598 - protein, 520 aa, synthetic construct
  source 1..520: note = MG168-3 reverse transcriptase
MTPNGVTPWPSLEEARTRVLGIQRKLHRWTKDDAKRFDDLFNLTFDRATLLVAWSRVRGNRGSGTAGVDGVTRWHIEHRIGVERFLEELREALKVRSYRPQAVRERGIPKPQGKVRYLGIPTIRDRVVQMALKLVLEPIFEADFCPTSYGYRPARRAQDAIAEIAHFINPPSTYEYVIEGDIRACFDNVNQGILMRLVRERIADRKVLALVNAFLRAGMMKETGGFRATLTGTPQGGILSPILANVYLSVLDRHFERAWKYQTRYIECTTYYRRRGLATYRLVRYADDFVILVRGSREQAEAIREEVARLLWDELQMELSAEKTCITHVDAGFDFLGHRIRRVQWRGKSVAVTYPSKKSLEAVKREVKSLTTCWTRNLSLRVLLIRLNPVLRGWSTYFRYDASKRTLAYVDHFAWWRVFRWLRKKHPQRSVKYLRRRYTGGRWQIQEEDVELFRPSRVRVERYRYRGRRILVPWMEPEELGRVGRYGSYDFDECALLERLQEALASAEQTTVLCGEPDAR

SEQ ID NO: 599 - protein, 491 aa, synthetic construct
  source 1..491: note = MG168-4 reverse transcriptase
MDGDTSVNTGVVAWPEDDAAWLSVRRMQLKLHRWASEDSARRFGDLFNLVYDPAFLVHAFERVAGNDGARTAGVDGVTVAQIETRVGVGVFLGQVRDSLKSGEYRPSPVRQVKIPKGGGKLRSLGIPTVVDRVVQAACKAVLEPVFEADFLPCSYGFRPNRRAQDAIAEIHHFTSRPADYQYVSEADIAACFDEIDHVAVMDRVRRRIGDKRLCALVKAFLKAGVLNDLGDREESLTGTPQGGILSPLLANIALSALDEHFTRQWDTDTGMLGSPARRAKRKRDGLGNWRLVRYADDFVLLVSGDRHHAEALREEVSAVLTPLGLRLAPEKTSVVHIDEGFDFLGFHIRRMRKRGTNKHYVYTTPSRKSVQKIRDRVRNKTYRSTLNMDLDELIAGLNRSMRGWANYFRHGVSKATFNTVDNHAWLRLVGWIRRKHRNTSRKQLRRRFCDQGWRIAHNGVVFTGASSVAVTRYRYRGANIPTPWTQAATSS

SEQ ID NO: 600 - protein, 476 aa, synthetic construct
  source 1..476: note = MG168-5 reverse transcriptase
MNTDESEHALYEAERRVLEIQTKLHRWAREDSHRRFDDLFNLVADPAFLLVAWARVRGNKGARSAGVDGETAYYVEAVRGVEVFLDRLRTSLKDRSFCPLPVRERMIPKAGGKLRRLGIATVTDRVVQASLKLVLEPIFEADFLPCSYGFRPKHRAHDAVAEVRHFTSHSYEWIVEGDIKACFDEISHLALLDRVRARIGDKRVLALVKAFLKSGILGEDRVLRENDAGTPQGSILSPLLSNVALSVLDEYIAKGPGGPGSTFNDRIKRRRRGLPNYRLARYADDWCLMIHGIRADAEVLREEIAGVLAPMGLRLSEEKTLITHIDEGLDFLGWRIQRHRKRGSNRYYVYTYPARKALAAVTDKVKAQCRKTGTDLPLDALLICLNRMLRGWCAYFRPGVSSTAFQYLSSYTWGRVIHWLRRKHPHMNWKELRRRFCGGGWWPASEERELFNPAKVGTTRYRYRGSVIPSPWPITG

SEQ ID NO: 601 - protein, 620 aa, synthetic construct
  source 1..620: note = MG169-1 reverse transcriptase
MAKGGSYINSILLMENVKYIMTNPEIILNNLVKHSKISGYKFERLYRILFNEQMFYQAYQRIASKKGNMTSGTDGKTVDGMSIERIERLIASLRDETYKPHPAKRVYIPKKNGKKRPLGIPSFEDKLVQEVVRMILEAVYEGYFESTSHGFRPRKSCQTALTSIRNTFLGTKWFIEGDIKGFFDNIDHNVLIETLRERIKDDRFLRLIRKFLNAGYIEDWKFNNTYSGTPQGGIISPILANIYLDRFDKYIAEYIQKFDTGKTRPKNREYRIYSDRKRRLLAKFNAETDADKREEMAQRLKEYSRLMYEHPSVDEMTPTYKRMKYVRYADDFLIGVCGSKAECEIIKNDIAMFMKEKLKLELSDEKTLITNAKDRALFLGYEITVRQSQSTKRDKNGMLKRMFNGKVILLLPREVARKRLLSYNAMTIIQVNGKEDWKPKSRGAMNNCKPEDILAKVNSEIRGFYNYYAIANNISTLGKRFGYVMSYSFYCTLAQKLNISYPKVIKKYREGKDCVIRYTDAKGRERCRMLYNGGFQQKEPTADAKCDNLPNPFVISSPSLVERLKAEVCELCGAKGKTVMHHVRTLKTLTENTAWERAMLQMHRKSLAVCPNCYAHIHDD

SEQ ID NO: 602 - protein, 975 aa, synthetic construct
  source 1..975: note = MG169-2 reverse transcriptase
MLEVKVSNRLTCLTTISGPANVVCPIDSGILFHRYYVFISINTPLHSTPMRVCSFFNACSKKRSNCFKAAIRGFSSDLSSSEDKDRTVVSVSSKECFLPVPSRKADMSLSVQSIPSKLSNNHVEGSTDVVDSLRQLKPEKDGIYTRITTRFLANPEFLKLAYAHIKNKEGNMTSGGSNSNIILDGISQKWFEDTALRLKNGTYEFSTSRKINIPKKGSLKLRPLTIGNLRDKIIQKAIQLVLEEIYENKEKIFSDASHGFRPNRSCHTALQQIKNEWTAIPWFISIDIKDAFGTINRDILISCLKVKIRDQRLFEILLKMLQADIISINGIWKEFYGVPQGNILSPILANIYFHDLDVYIDKKIINRYKKGTKAARCLDYQRAVSFTNEEKKASLQKRKQLARRKRRDAHKAGLRYTKIDGSFIRVKYVRYADDFLIGVRGPKTLVLKIFRSVIFFLKSTLQLNLNEEKSKIIDSFSNKISFLGMLIHNVSTKKLPFRKSRALQNKKRKLTRVLLRADALENQRTKKLKDECLKLLRNSYKSSRKDRKPLKEDFISLIKGSPVFGDVIKNSNRAIYREFIQSLLLVSDIQENHTLKDFLNLWEKELSLDTEKFKNENSPTRPITKSETIRRIVEILKVQHNLPAQEVQWFQLFKGANKARGSAWKPVWIDKFSLSKNAVSKLKLPVNNIYHVKYNVENIRLVIEDLLLQAEQRPSKTYIDHIPNNNAKSVRQTWDEEGVFTSLPPQINSDTSEIYKRLKEASIINSKKKPICKNSLLAAEAWLIISYYNTLAHGLLSYFRCVDNFNTIKKIVTYHLRYSLLHTLAHKHKCSIKKVLEIYSKEIKTNGRQGKVVSFINSIAVTNLKKDFLFKDLRNPYSNLTKSYISLQRGAISANKCAVKNCVETDNIEVHHVQKLFRNIDRTGKVVIQGIAKKLSGRLAMESALKRKQIPFCPKHHKDWHNGVISKIDLDEPWV

SEQ ID NO: 603 - protein, 854 aa, synthetic construct
  source 1..854: note = MG169-3 reverse transcriptase
MRDVNNGWLVRYLHSNTASAFFFLVYLHIGRGMYYGSYRAPRTLVWAIGTVSAPKGRYFGSVPRRLFKSGIDSIQFEYRMPLPGMWLITLSFGIAGGRCSMVRILFNLQLTASGIWHGKDNELDTIKHHRPRGNDHNRSCHHFDGVLRVIWLAHGETTTPSATSRRFNCCKCLNQKVTNLSLLRDRTAYAIGTRRRSFHTRGRVERPQQDSKGSSFNQEILETKVLEQRKAAGLTSSKVRKGGKRAALVTLVRKELQLYLDKRGSYNGLINILKNPEYLVACYESIRGKPGNMTKGSTKETLDGLTWEWFVKLGESLAKGKFDFTPARRVMIPKANGKLRPLGINSPREKIVQKALAVIMEQIWERIFLNSSHGFRPNRSIHSALKELYLEGGNYNWVIQGDIEKCFDAIPHSVIMNRVQKIIKCKRTLELIKKSLDAGYIDPDTKKTVNSDLGTPQGSVLSPLLCNIVLHDFDAFMSSMREEYNFGEKRRPNPDYVKLNSKRRYIRDIRERRKILREMRQLLASDPMDPNFKRLKYIRYADDFVILIIGPLGDAEKIKERIRDFLLNKCGLTLSLEKTVISNIQTEGFKFLGAECRRASMTKNHVVKHKDRTIRATTRLRVNIDLTKVYKKLVSIKVATWDNKNLQVPRGTANNALINFSHAEIISWYNSKIQGIQNFYSFAGNRKRLHLVFWILASSCALTLAKKHKMSSMGQIFKKFGRNLTCPETDVSLVRPSALEAIHDYKSNNVPDNLDFLDVTWAAKLTESNIGKSCFLCGSTKDIEMHHLKSVKDVKQKIRNGNASFSAWKGAFLRKQIPLCSYHHDLYHGGKLNYADLKQISSFTKLPDSPSDNK

SEQ ID NO: 604 - protein, 579 aa, synthetic construct
  source 1..579: note = MG169-4 reverse transcriptase
MKEKEDRKLLSSKDIISKDITYELLAIIKNKGNNRYGYLLKFISNVDVLLSSFEHIVRKDGYYSKGSDKQILSNVDIKYFENLSRELNSGSYKPNPSRRVYISKPDGSKRPLGISCSRDKIVQQACMIALSYIYESIFLENSHGFRPYKSCHTAINYFKLHFTSTKWILNIDLKGCFDNINHQKLISIINENVDDKGFEILYWKMVTAGYIYRGTHFKTIEKGTPQGSILSPILCNIFLNKLDIYLLDLKNEFDKGTEKRKNKSYRKLAVKEARKQFITSRDQMDTNFKRLNFVRYADDFIIGIDGSLSDAQLIGAKVEKFLKGELLFEIKRFTIKNFCQEGDNFLGFTLKGWTTKSRKIINTKKGKQLVNHRPKVLIPTTKILNKLHEIGLVKKYSNHFRGTAYRKLVEHPLYNIVEYFNSVYRGIANYYCIAYNINTLRNLNYILKVSCCLTIALKMKLFTVSKVLKKYGRNVTINENDSTIKFISYRKLKKPYFKSIEPFNLDNIIKFFSYGLRSKLKTNKGCENCGSSLNLSLHHFNPVRNINPKLKTLEKIKIKVGRQQILLCRECHNKLHSAK

SEQ ID NO: 605 - protein, 834 aa, synthetic construct
  source 1..834: note = MG169-5 reverse transcriptase
MRKHKRIHFGVFLNIRSLMICESSLLAITMLLTDRRATVRFLWKLRLLINHNLLNSGMFQNTEILTWHYSSTDAGDNSLYLTGVSDLGTVKAYPLRKVTNQVQWVIREGETLAGPVDRSSMPTLTSCQALAIHLETESFDADLPIPKVDQLVFNKKSSEAKPHLSFMPSIAIPVNLQNHKKKMRRGRGAVVPNTMGRALCGLSFTQDRSLSTKTFQSDVSQGRIPNTMIKRLETLSKLFTHNPDAQADGLMRILKDSQIWVAAYIKLKTNPGSMTEGGDKGTIDGTSLKRLLMLRDSVLDNTYLTGRARRKNIPKPQGGTRPLGIPTFRDRIVQEVIRSILETIYEPVFHKTSHGFRPGLSQHTALRDIRKNFRGASWFVEGDISKCFDKVDHTILIRLLRKRIADEKFLSLIKKILVNIVKEEDNTETVSIIGTPQGGICSPLLSNVYLHEFDLFMENLKENYDTGTHRRRNPEYDRRYRKGGVQEARKVSYGAPNDPYFRRLGYVRYADDFLIGIIGPIREAREIREQIRQFLKDTLNLELNMEKTKISNPSSHKIKFLGYVLGKSGRNAYTYIRKYQGTKRKIRVIRGGSPYLKVDTQKVIKALAQKGFCDGKGFPKPNFYYLPEPQTTVIRKYTQILRGLERYYHLADNKRQAISKFNYILRYSAAKLFAAKYKLKSMSKVFALGGKDLSKPIKSKNAIGITDSALAEMEETVTNKPSRRRTQTLKGLPFTKYSTISKPDIGVFTKYKNNHPFSNPLESLTWRTIRGVDAFKLPCAICGAENNVEMHHIRQLKNLKGKDLIEKKMISAMRKQIPLCRKHHLAAHGKKMYK

SEQ ID NO: 606 - protein, 825 aa, synthetic construct
  source 1..825: note = MG169-6 reverse transcriptase
MHIIQDLEDRHNHLNNTNLKSSISMWYERWFLSTNAKDIGTLYLMFALFSGLLGTAFSVLVRRCAKLLLNDPFILHSSNMLTTSGLVGLERVPMNIACLSKALSIWNQVWESMRVVVPMVKTTLFKLYLKGTSRKGSKLAWNRLCILIEIMYVRILIRCNITQITCSNKREEGEPKGTIGNNYELRDHLRGRSSLLYGDGDFVVGGKTPKGVRMFSSKGVKEGSGVRPDLNQSELPNKFTKLIDISSNKVNNMKFNDLYTLMFNMKMYEVAYHKLKSNPGNMSPGIDQITLDGISQEVFQNIILTMKDESFKFKPGRRVDIPKANGKTRPLTVASPRDKIVQEVMRMILEAVFEPTFSNNSHGFRPNRSCHSALRQVKTQFGGASFFIEGDISKCFDSFDHDKLIELIRERISDERFIRLIWKSLKAGYVQFHRTKLSIIGTPQGSIISPILSNIYLNKLDLFMDKLKDDFDQGKSAKINPIYKSLDYYRQKALKANDQLGALKYLKEMQKIRARLPKDDNFKRLYYVRYADDWIMAIRGPLSETTRILESTREFLRKELNLDLSKEKTLITNPHKDTAMFLGTQIRISNHTYFYRGPNGQTIRAVSQLIFTAPIDRIQKKLADAGFWDNANKRSVPRMLWYHENKDAIIILYNSVIRGYLNYYSFVSNFGRLAATVEWILKSSCTQLLAAKFKLGTTLKVIDKFGEDLKGSDNIALLKPSYRKNTWDFKLNNSYVNLKALYAKGISKASLDGLVCSKCESDVQVEMHHIRKLADLNPKLSEIDRIMASKKRKQIPLCRACHIDHHKRSFLDRTRSKSLIRKIIK

SEQ ID NO: 607 - protein, 694 aa, synthetic construct
  source 1..694: note = MG169-7 reverse transcriptase
MRVEKNQYQELSLTAIIIRDVISMTKGVLRVNIPVVTVTVGLPKSRKRYGNGGLIVAGIKTQVFSNTSKVMFRECEVTQRRGLTTSNLVMGHKKLVQDLNNNFYKDKICNPTKLIQAYELVSSNKGSNTKGIDSETLDSYSKDTIHSVSKSLKDHSFKFKPIRRVEIAKSNGGSRKLGIPSPRDKVVQKVMAMALEEIYEPKFSNSSHGFRPKRGTHSALKSVTRWSGTKWFIEGDISTCFDTLDHHILETLLKKEISSKPFIDLYWKAVKSHYINPVNKVEEFSNVGVPQGGVLSPILSNIYLHELDKFMQTKIEESKKSGPTSIDNPHYKKVHTKISNMRQYFSPTYRRNRSLTKEQEQERLKEILKLEKVRTKLSSTIQGPGYRVYYVRYADDFLIGINGPRRIGEKLKQELQTFLLNELKLTLNLEKTKVTRSDHGACFLGARLKRHASRTNDQKRRTSSVTRTGRKVRARVPQGNIIALAPLEHLIRKLQSQGICKTRNLKKHDVIPTRKTAWTNLNLVTIVQKYNNVWQGLLNYYSFAYNRCQLNWIQYLLHHSLACTFMNKLKLNSRRQVFKKYGKTIQVKDESGKLVAFKLVKSLPRIGKFSNKILPSGFETFKYSLRTQSVFDKACKICGTKRNVEMHHRRPLKAHKTDNTLKSIQINQSRKQIPLCASCHQRVHNGLYDGPGIY

SEQ ID NO: 608 - protein, 601 aa, synthetic construct
  source 1..601: note = MG169-8 reverse transcriptase
MQEIETVLNVIQNRGKQGKSLERLYRQLFKEELYEKAYAEIHANEGAITKGSSNDTLDGMSQKRIAEIIQKVRTTTYRWNPVRRTYITNEDGRKRPLGIPSGDDKLLQAAMKLLLEAYYEPQFSKRSHGFRPGRGCHTALKQIRESHRDTSWFIEGDIKGCFDNIDHETLLGIMEEKIRDQRFLNLVEYLMKAGYMEDWKWYGTYSGTPQGGIISPLLANVYLDTFDKWVEEELLPHYNFGSQKEKGRKRNPEYRHYEYKRSQAKKMGDVEAYERYGKMMKNVPSIIDDDSYRKLEYIRYADDFLLSFAGPKKEAEEIRERISEYLERELNLELSIEKTLITHARNDKARFLGYDLCVMQSDERRTANGTIWLGVPREVRRKAMRKYTKKGKAVHRPELLLNSDYDIVARFQAEYRGLVQYYQMAHNVHRLQEVEWVTGTSLLKTLAGKHKTSVNKIVKKHKSTRTVNGKTYKVFEARAERKGKEPLTTHYGAVPLIRKPEASITDRIVTLGKGRVELLQRLSNDECEMCGEKGNIEVHHVRKLRDVNKPGRKNKPAWVHRMSALRRKTLMTCVNCHDAIHAGKHRSEWDNWKIVLESRVR

SEQ ID NO: 609 - protein, 591 aa, synthetic construct
  source 1..591: note = MG169-9 reverse transcriptase
MQSAEVVLGVLRERGRKGLPCEQLYRQMFNKDLYLLAYGNIYSNSGAMTPGASEETADGMSEEKIEQIVEAMRCERYRFAPARRTYIPKKNGKLRPLGLPSWSDKLVGEVVRLLLEAYYEPGFSDLSHGFRKRRGCHTALRKVHDTWTGTVWFIEGDISDCFGSLSHEILLGILAEKIHDQRFLRLIRNMLKAGYLEDWEYRETLSGCPQGGVVSPILSNIYLHKLDEFVEQELIPQYTRGTGRKVNPVYKRLHRHMTSARLRGDRAAVRDLKKQLRAIPYGDPMDPGYRRLKYIRYADDHILGFIGPKAEAEQIKARLAKFLRETLGLELNQQKTLITHARSQPARFLGYHVRVQHCNTKITGGQRSANGNIALRVPPDVIRSQCARYRKHGKPWYRSRLQNLDDYDIVRTYGAEYRGVINYYLLAQDVSRLHDLQWNAETSMLKTLALKHRSTVSKMAARYKAKIETSDGLRTCFEARKHREGRKDLVARFGGIILRQNRRAVITDPASGPPLYPRKELTRRLRKRECELCETGTTVAVHQVTGLKDLGKPGAGQPAWATLMAKMRRKTLIVCAPCHDWIHANPVAHAA

SEQ ID NO: 610 - protein, 594 aa, synthetic construct
  source 1..594: note = MG169-10 reverse transcriptase
MKPTSEILERMNRNSGEHPEGVYTRLYRYLLREDIYMTAYNNLYANNGAGTKGVDDDTADGFSVEYVQQIIAELKALNYSPKPVRRTYLKKKNGKLRPLGIPSFKDKLVQDAVRQILESIYEPIFSDFSHGFRPDRSCHTALKQASKYFRGTKWFIEGDIKGCFDNIDHTVLLNLLSEKIKDSKFVTLIGKFLKAGYMESWEYHKTYSGTPQGGILSPILANIYFHELDKKVEQLRADFSQPNPKSCSLEYGRIRREILKKRKQYGELTDDTQKKSLLREIHKLETEMRKLPYKDATGRKIVYVRYADDFLIGVSGSRKDCEKIKQELTAFISEKLKLELSDEKTRITHSSENARFLGYDINVRRNNQTKRTAKGTVQRTLNQSVELLVPFEKIEQFMYQREIVIQAKDGSLIPWQRDAMAGLTDLEVLDTYNSQTRGICNYYSLASNFSKLTYFVYLMEYSCLKTLAKKHKTRISAIKKMYQCGSSWGIPYETKSCKKRMMIIKFSDLKKGVVYQNADIIKHHIHFTNHSSLEDRLRANQCELCGATDVPLEVHHINKVKNLNGKEQWEKAMIARKRKTLIVCKNCHIAIHHS

SEQ ID NO: 611 - protein, 596 aa, synthetic construct
  source 1..596: note = MG169-11 reverse transcriptase
MKPTMEILASIKENSSKNSEEVFTRLYRYLLRQDIWFEAYKNLYANSGAATNGVDNDTADGFSKEKIDKIIASLADETYKPKPARRTYIKKANGKMRPLGIPTFTDKLVQEVLRMVMEAVYEPVFLNCSHGFRPKRSCHTALSTLKKEFTGAKWFVEGDIKGCFDNIDHAVLVGFINQKIKDARLIKLIYRFLKAGFVENWQYNNTYSGTPQGGIISPLLANIYLHELDKFVMTLKSEFDKPNETVRTKEYNRLFTQRVKLKKLIDCADGEEKQDLLKQYKQVRAEMMKTPYTPQDDKKIKYIRYADDFLIAVKGNREDCMEIKRKLAEFISGTLKMELSDEKTLITHSSEKARFLGYDVSIRRNSSIKPHGKGRPTQRTLNNKVELLIPKDKISKFLFSKGIVRQKKCDEMFPISRVPLRNSTDLEIITIFNAELRGICNYYSLASNFSDLNYFNYLMEYSCLKTLATKHKTRITKIKEKFKDGKGSWAIPYETKSGKKLMYFAKYTNCKGANATDTVTKAAVTIGYNRNTFDKRLNADICELCGKTGAGNYEIHHIHKVKDLKGKELWERAMISKKRKTLVVCHQCHQNIHHPK

SEQ ID NO: 612 - protein, 568 aa, synthetic construct
  source 1..568: note = MG170-1 reverse transcriptase
MDYTESDFDAASPDEVSEWHSIDWKAVQYFVGKEQSKIAQAEQAKDFRRVKRLQRNLTRSWQAKALAVRKVTENQGKRTSGVDRELWDTPQKKWIAVSRLNLHGYRALPLKRVWIPKADGKERPLGIPTMRDRAMQALCLLAMEPAAECHADPNSYGFRKGRSTHDARQQLFVCLSKKVSAQWVLDADITGFFDNINHDWLLANVRMNRRVLGQWLRCGVVDKQQLQKTEAGTPQGGIISPLLANLTLDGLEAGLMRFLKDQLGFEKAKKAKVHLVRYADDFVVTGDSKEVLETVVRPWVEAFLRERGLQLHTGKTRIVHINEGFDFLGWNFRKYSETLLIKPSHKNVKAFYSKVREVIAGHLSQPKEVLIAKLNPILRGWARYHQGVVAKATFTKLDHQILWRLRRWGMRRHPRWTRGKVFKHYWTHTSGRWEFEAKTRNRWDEEMQLRLYTLADTKIVRHKKVIGEYHPYDPAWEAYGEGLKRNRMVQSVWSGQRLELWMTQNGKCAHCGTDMDHEDSGLDNHHIVPVRWGGTDSLSNRVLLHPWCHRRIHALGLEVAKPVPVRGL

SEQ ID NO: 613 - protein, 493 aa, synthetic construct
  source 1..493: note = MG170-2 reverse transcriptase
MNVEQSMCAASGPAMQWEQIDWSRCEQKVRRLQARIVKATQEGRRGKVKALQWLLTHSFSGRALAVKRVTHNKGKNTSGVDKAIWRTPASRYKAIDTLRRRGYQPQPLRRVYIPKANGKQRPLGIPTMKDRAMQALYLLALLPIAETTGDLNSYGFRPERSTADAIEQCYKVVGMRHSAQWVLEGDIRGCFDNISHEWMLDHIPTDKEVLRKWLKTGYMENRKLFATEAGTPQGGIISPTLANLTLDGLERLLKQTFRNRQVGEKHNPKVNFVRYADDFIITGSSKELLENEVKPLVESFLLERGLQLSPEKTCITHIEDGFDFLGQNLRRYGRKVLTKPSKKNMHAFLEKVRGAIKRNSTAQQANLIGILNPIIRGWANYHRHIAASSAFGKAEMAIWRSLWSWAKHRHWKKPTAWIANRYWHRLGNGRRMFAVMAGSNAPKSRAMVAWLVNPAKTPIRRHIKVRSNANPFDPNWRSYYDARKSLKRASSQQ

SEQ ID NO: 614 - protein, 523 aa, synthetic construct
  source 1..523: note = MG170-3 reverse transcriptase
MLKEERQMTQLGNFKIPKSGASSTNKLNWQSINWVKVKRDVRRLQMRIAKAIREKRYNKAKSLQWVLTHSLSAKLLAVKRVTSSSGSRTAGVDGKICASNKDKMQLALSLRRYGYNAQPLRRDYIPKRNGKQRPLGIPTIKDRAMQALYLLGLEPIAETLADPNSYDFRQQRCTADAIEQCFKVLSHKTSAQWILEVDIEKCFDRINHNWLKENILMDVSLLNQWLESRYIERKQLHPTLAGTPQGGIISPTLANMTLDGLEKAIKSVAKPASKVHVIRYADDWVVTGNSQEILENKVMPAIEKFLKVRGLTCSREKTKIVHIKDGFNFLGFNIRKYHDKLLIKPATKHVHAFLKMVRNITKASVSLPTDILLRVLNPKIRGWGNYYRHVVSKDVFCYVDNCIYLAIARWARRRHPQKPAHWLRKKYFRQQGMRNWIFSTKVYDKKGKIVNRDLVQLKYLPIKRHRKIIAEATPFNPEYIEYFLKRKSYQGLNWLYRSLQKQAKSFSRSAKLQNQNSRIEQES

SEQ ID NO: 615 - protein, 461 aa, synthetic construct
  source 1..461: note = MG170-4 reverse transcriptase
MKLTYKQAIRPFARGPPLRLVQSHFAELFIRRQQNLLMNFCYSDERRWRNINKSTVPAEIQRWKDIDFRKAEIKVKKLQRRIASAWANKNFKTVDTLQHKLIHSFSAKALAVKTVVDNKGSRTPGVDGVIWSDLRQKLDAIYQLRRRGYKPMPLRRVYVPKKDGTLRPLSIPTMRDRAMQMLCKMALEPIAEATADKRSFAYLSGRGAREAIICLKVTMRDNPQFRWVMKADVAGCFDNIDHSWLLEHIPIDRKILYRFLKCGYIEDSTFYPTERGVPQGGCISSVLCNMTLDGLEGLLKQQFGLSVCMIRYADDIIIIGESREILVQAVTPVIESFLAERGLALSKKKTGYYPVKAGVSFLGWKTYRDRDRVISEPSNIAVNRLMNEIESIAALAIDYHAQCEKVSSKIRGWLNYYRGIAPRLSLNEVEFYIAQSLLHMQDVELLAGEIQSIFSELLDTL

SEQ ID NO: 616 - protein, 467 aa, synthetic construct
  source 1..467: note = MG170-5 reverse transcriptase
MIRHRDNSSESWKTLPWKQLSRNLFRLQRRVYKAVQVGDKRKAKSLQKLILKSTAARLLAIRQVTQLNAGQKTAGIDGQTALTFEQRFELSEKLRTEANNWKHQGLREIPIPKKDGKTRILKVPTIADRAYQCLVKYALEPAHEATFHARSYGFRTGRSAHDAQRQLFNSLNSQANGIDQRVIELDIEKCFDRINHTAIMDRLIAPLSIKQGIFRCLKAGVNPEFPELGTPQGGVVSPLLANIALNGIESIHRYHRDSNKRITDKTSAESIIEPSVRYADDMVIILRPQDDATVILDKISHFLAERGMKVSEKKTLVTAATDGFDFLGWNFKVQNNGKFKCVPSVDNYKAFRKKVKAIVNNSNYGATTKAEKLAPVVRGWRNYHRFCKMDGSRFSLWHIEHRAFKVFNSETKQNCHTCKQLLKKAFPQVPYSENKYINVTGEKSPYDGDLTYGSERNSPLVIRQKYL

SEQ ID NO: 617 - protein, 607 aa, synthetic construct
  source 1..607: note = MG170-6 reverse transcriptase
MSTASSPLVYEWNDIPWRSIERKVFKLQKRIYQAAQHGNKVAIRKLQKLLLSSWYAKCLAVRKVTQENKGKKTAGVDGKLALSPKQRIRLVQTLSLKPKSTPVRRVWIPKRGSDEKRPLGIPTIENRAQQALAKMALEPEWEARFEPNSYGFRPGRSAHDAIEAIQQSIKYTQKFVLDADIAKCFDRINHQALLEKLETFSVMRRAVKTWLKAKIMDGDELFPSEEGTPQGGVISPLLANIALHGLETAITTAFPKTVKIDGIIHGRYQPRVVRYADDFVVLHADLKLVEKATSIAQEWLSGMGLELKPSKTRITHTFKKHEGNVGFDFLGFHVRQFKVGKCNYRTSGHSRILVDFKAIIKPSKEAIARHYRQVAEVIERNKSAEQANLIRLLNPKIVGWTNYYSTIVSKAVFSKLDHLVTKKLLRWAKRRHQHQSRRQTVRKYWKFSEKGRGWIFQASDISILRWYADVPIKRHVQVAGTKSPFDGNWVYWSKRLQHYPLLTFRQAKLLKEQEGKCRWCRLYFKQGDRIEVDHRIPRRYGGRDEYGNLQMLHVHCHDEKTAIDGTIDSVGPDSIDVNDYVIEEPCEVESLTHGSEDEAFGRPDVLV

SEQ ID NO: 618 - protein, 553 aa, synthetic construct
  source 1..553: note = MG170-7 reverse transcriptase
MQTMRNANVTKRTTDWRSINWRKAYRIVRNLRQRIFKATQKGNLRKVRSLQKLMMKCYSNILLAVRRVTQINRGKNTPGVDKLIIKTPEARGILVDTLSLFIPWKPLPTKRVYIPKSNGKKRPLGISTIIDRCIQAIVKNALEPYWESKFEISSYGFRPGRSAHDAIEKIYLTACPHRRKKWVLDADIKGCFDNISHEFLMKTIGNFPARKLVYQWLKAGYVEQGEYFHTSSGTPQGNIISPLLANIALHGMEEALGIKYNNRSEIVGNRALVRYADDFVIFCETKEDAEQAQTALEKWLNLRGLELSKEKTRIVHLKEGFDFLGFNIRQYQVTNTKTEWKLLIKPSKESILNIRKKLRQEWLNLKGHNVNSVIEKLNPIIRGEANYFRIGVASEAFSALDDWMFKRECKYVNRTHPKKNKQWRANKYWGKLNLERNDKWVFGDKNTGKHILKFSWFKIKRHKLVVGKSSPDDPALRKYWEEREKDKTSNHPKSIQKIASKQGHTCPICGQSLYNGEEIHKHHKTPKSKGGTDNYSNLELVHLYCHQQIHSGT

SEQ ID NO: 619 - protein, 557 aa, synthetic construct
  source 1..557: note = MG170-8 reverse transcriptase
MTKLNQKWHNINWNKTSKYIKNLQEELVVAYKNNDQKLLFSLQEKLMMSFEGRALAVRQIVTNDGKKTPGFDKIIWNSPSAKLQAILQLREILIQKSGDYQTGPVRRTWIPKDQSDELRPLGIPNMIDRGLQALVLMCLDPIIEEMSDTYSFGFRKYRNTGNAIQRIRTILDKPKGPKWVWDADIEKCFDKISHEFLEKETKLIACPKAYEYIIKWLKAPIINKGIKTFPSDGTPQGGILSPLLCNIALNGLENAVRDGLPSPNSSEGRKISGSWVIRYADDFIVTSPCKERLVKEHIPRVSFFLSKRGLNISEKKSKIRSLENEGFTFLGWDVTLKSRSLKRNKSKTNKKVLIIRPSKKSIKSFKREIKDKFRSNKPIRALISELNPVLRGWTNYYRDSYHSQEVFQSIGHYIHQLWWKWAQKKHPKRNKNWIYNRYIFNTEKNSWRIGESKDIMLFDVIQAKQLRIKSLRNNVNPYLDEDYYIQRTVIRDSEKFRVAIYKKQDFRCYVCEQSLYGSEEVHLHHLIPRKDGGQYTLENIVPVHATCHESITYTRKD

SEQ ID NO: 620 - protein, 499 aa, synthetic construct
  source 1..499: note = MG170-9 reverse transcriptase
MSVSEPEITSVTDLTDKELTLQWKTIDWSKAEGIVNNLQSRIASAAKEGNWKKVSKLSRLLTHSYYARALAVRKVSTNKGSRTPGIDGVLWTSSGDKMRAVLQLKSKGYHAKPLKRKYILKKNGKLRPLSIPTIYDRAMQTLHALALGPVESATSDKTSFGFKPYRSTKDAFAYLNICLSKKNAPQWIVEGDIKACYDEISHEWILANTLMNKKVLKEFLKSGYIENYHLFPTENGTPQGGTISPIIANIVLNGLDTILAEVFYSWNNGTIDKKHRNKHRVNFVRFADDFVITADSPETAHKILDIVKTFLEPRGLTLSKEKTLVTHISDGFTFLGWNFRKYKGKLLTKPSKESQKDIITKIHDVMYKARARSQSELIRLLNPIIRGWAQYHNHAISSAIFKKLDHIMFIMLVSWARRRHPNKGFAWIMAKYWHRIGKWKHAFSTDSQTLERFSNMKIIRHRLAKLDKNPYIDRDYFERWRVIEHYRKKQISYSKSSLN

SEQ ID NO: 621 - protein, 565 aa, synthetic construct
  source 1..565: note = MG170-10 reverse transcriptase
MNDIKTSCASTDRKIVAWDSIDWDKCEYEVQKLQARIVKAQKDGRYCKVKALQWTLTHSFSAKALAVKRVTSNKGKETSGVDRVLWDSPLGKWKAISTLKRRGYCPLPLKRVYIKKSNGKLRPLGIPTMKDRAMQALYLMALDPVAETTADNHSYGFRKERSTADAIVQCFIVLSRTVAPEWILEADIKGCFDHISHEWLLNNIPMDRVMLKKWLKCGFIFNKILNPTEEGTPQGGIISPTLANMTLDGIQKLLQERFKKRKVKGVEIYPKIHLVRYADDFIITGRTKEVLENEIKPLICEFLAERGLTLSEEKTKITHIREGFDFLGFNIRKFNNTLLTTPSEKSIEKFLEKIRTIIETKKSTKQESLIRVLNPIIKGWSNYYRTGTAAKSFQRVDWEIFRKLWQWARRRHSQKCKGWVKEKYYRRIGNQAWCFSAEKEIQKKGELKYVQLVHLAAVKTKKHVKIRHDANPYDTNYKCYFEERATRKKLEALKGKSSSWKYAWELQKRKCPICGETLNLNNDWKISKQFVDGKLKERIYHEDCYYNDVHPTKKKYYESVSLQKL

SEQ ID NO: 622 - protein, 417 aa, synthetic construct
  source 1..417: note = MG172-1 reverse transcriptase
MSNNVSPYKAVRTMERLSEAWKQVYKNGIKSTSIDTKNEILEFKKNEIKNLRKIQRLLQQNKFKFENSRGILLKRKGKDPRPIVIASVQSRIVQRSILDVLQENSSIKKYYLSVPTSYGAIKGEDKGVRNAIIATIEAIKNGAEYFYKSDIASFFTKIAIPKVIEVISTFIPDKDFVELLRNATILEISNLNDLGDLKHYFIFDDIGTPQGCCLSPLLGNIFLAEFDKELNKNDIICLRYLDDFILLAPTEKAVRAAFRRASKILAKLSLEAYTAVSDPKKAKVGYYKQGFEFLGVEILNKLIRPNKASCNKLLNEIKEIIKNSLEMNFSMTQSLYKEEYSVTKTLYHIHNKIKGWGNQYYFCNDRNIFITLDEKISGEIDRYLNSFLLKREKLDAKQKRKQLGIHLLIDSKNVPIT

SEQ ID NO: 623 - protein, 439 aa, synthetic construct
  source 1..439: note = MG172-2 reverse transcriptase
MNQQGHRHLSSLSLEVRKRRTLEDAWAAIRANARVSKSADTRKEIEAFEASLSSNLRRISSELQKGKFAFAPAKGVKIPKGADKRQFRPLVVARVESRVVQRAIHDVLSEVPALQPLIYTPHSFGGVKKKRKGELAAVPAAIQAVLDAIKAGGTYLVRSDISKFFTRIPKSSVTNLVANAVDDVDFISLFESAIKVELENMAQLRESASAFPIEDIGLAQGNCLSPLLGNLFLHSFDEEMNRQAGVRCLRYIDDFIVIGTSSECAEKAFSLATQRLKTLGMEISAGKTKEGRVRDGFEFLGIHLSPGLIRPSKSSRDRLIQSVKSAFDESNKGMLGAKKGSAILKSQSLLETLCRVGGIIQGWGKHYRFCNDQETLRQLDVKIEALLKRYLGIYREARDTVGGATKWNLLGIESLAQIKRTPFSWPEVEQKQSASSAAK

SEQ ID NO: 624 - protein, 437 aa, synthetic construct
  source 1..437: note = MG172-3 reverse transcriptase
MKTLLQDVRSEQNIFAAWRHVKSSAINSRNDDIRGAASAFEHNHQKFLRRIILQLRAGTFEFPAATGVLKDKKLRASQNKAPRPIVVTDLETRIVQRALLQVLQPRETLDPRSRNSSLRIKKDERLGSLNDVNVSKYGVGGLIAPHGGVESAIRLITHAIDSGANYYFRSDIEAFFTKIPKSNVVERIAIETRDMDFANLFARALEVKLNNIEQIGPFEYLFPTGKEGVAQGSPLSAFAGNVLLYQLDQELNALDVTAVRYIDDILIVAQDVDRLNQAIDYAEQSLSKHGMKLYEPKAGSSKAAKGRCDNGIDFLGCFLQPNKCIPSADSIARFKSRVTSELSDSKSRIKDALKVGKLLDKRFSTTATLDRVFNYVYGWQKAFSFCSDVVPFEQLDRFVRRQILDYEIAVRRIVKDSSDESQTMVMGLPSMRQLHKG

SEQ ID NO: 625 - protein, 413 aa, synthetic construct
  source 1..413: note = MG172-4 reverse transcriptase
MSRLYKDICSQRTLYGAWRKVRSSAFFSSSDEIKREAEEFESRLPDSLIEIQRALSKQAFIFLQQTGVAQKKPGGKSRPLVLAPIPNRVVQRALLDVLQRKVRFIKRVLITPTSYGGIPEKRVAMAIADARKAMLAGARFHIRSDIPAFFTKINKDRVLEILRPHLNCAATLKLFEEAIKTDLANIDDLRRRRLDDIFPLGIEGVAQGSPLSPLLANIYLADFDQTMNSNGITCLRYIDDFLLLGASLSDVDKAFNRSLKELGKIGLGAYDPRTNKAKASRGTTDTGFDFLGCNVSPGLVQPSEATRKRFKMKLDAEFATASRALRYNAQNRDGDGKYSYSSALYRIDKIILGWGKAFTFCNASQTMKALDDFVSQKLMTLEAEKNAVLARSNSEARRRVLGVRLLTYVASPA

SEQ ID NO: 626 - protein, 420 aa, synthetic construct
  source 1..420: note = MG172-5 reverse transcriptase
MSFTLYEEVSDQDTLAAAWRHVRRSGMLSQSEKTKESIKAFDSDIDTQLAKIASLLREHSFDFGTAKGAPIKRPGKEPRPLLVPEVPARIVQRSLLDTLQNQPGIQAYVDHPCSYGGLPKKNRADAIRHACEAIADGATYFIRSDIHGFFTGILRQGVLDTIQETLRDDSIASLLNEATSIEIGNAEEIQPYLHLFPDYNEGIAQGCCLSPLFGNIYMHQFDEEMNRGDVVTLRYIDDFVILGQDRESTEQAFRQARRMLQALNLSVYRPGDGSRKAAEGSIKRGFEFLGCTITPHCVEPSRAARSAFLERVRNQLDLAAHEMRAGLHELPEHYRSSLVQTLSRISRMIRGWTEQYRFCNPSDAFTSIDVKVDRMVGAYLRSFFKHYKKCKRSPAVRRRLLGIWLATDSSRTPILPIRSK

SEQ ID NO: 627 - protein, 338 aa, synthetic construct
  source 1..338: note = MG173-1 reverse transcriptase
MEKNLKSVYLGRLQNALEAQQRTKEEIITCTQYAQKLMADNLPVLFEENHVYQVLKWKKSNQQQYHTFYLVQKGKERKITAPSRELKRRQRWILDNILIKLKVSDYAHGFVKNRSIRTNAELHMTHDYALCMDIEDFFPSIKEDTVKEVFARAGYSRRAANALADMCCYFGALPQGAPTSPYLANLVFIEKDHELALLAKQHDATYSRYADDLTFSSDNPLGNLSEAVNQVLQNNGFRLNDSKTKEFFPGQPKRITGLIVQNGLIRVPRKFKRTLKQEIYYCKKYGVALHLENTRAHKAINYREYLYGKAYYVNMIEPELGKHYLKQLDEILWPSYYL

SEQ ID NO: 628 - protein, 337 aa, synthetic construct
  source 1..337: note = MG173-2 reverse transcriptase
MSYVQKLKDKMVEQGEDENYVELCVSYTQKLCNNSVPVIFDFKHLSLLLGYEPPELAFYLFAPEDSFYTKMQIPKKSGGMREIEIPSDKLKSIQRWILRNVLENIEVHESCYGFTKGKSIYDNALLHVGKECVLNMDLKDFFPSITQKAVFNIFYQKGYTKSVSYYLAKLLTKDGVLPQGSPASPKISNIVALHLDKRLSELAKCYKATYSRYADDLTFSGASNIKNMIPIITQIIHEEAFFVNEKKTRYSYYFQKQEVTGLIVNKKVSVPKEYLRELNKEIYYCKKFGVSSHLTKIENHKSFFKEYMYGKAYFVNMIDKELGQKILCELDTILWEY

SEQ ID NO: 629 - protein, 1258 aa, synthetic construct
  source 1..1258: note = MG176-1 retrotransposition protein
MTDSASEAVARRTRRALAKQPVGSSISSGSDSITSAGIHVTAAPKLIDQSDEATCSRKGFDVSAPASQGRSDLWSDQEMKELQRLVGSNTGPTGKVSWVNVAEAWKSLGHSERTKGGLTAKWRDMKSRSATELVQGGTPSIQGDTGKTSSVKGTLDSSAQAVPAARTQRVIVQAVNKDNDKPESGNQRDGTAVASVDIQKKEDIANIFKEKLKLSKWIGCKPNSRKSPPRISGRSSLPLINEVDRLIERELWSKTGRKLSWRWLSIVVYAGAMTVSEIDGRQRLERKERTKEWFRNSYREIERLQSIIGKSTAELNRRCTSTGPTSKQLSNMKMLRKRYGVETFAEITSLVEKLKIRLKLLRSRVALRKEDERRCRLRLTPTKVLFRGKSGVGQGEKDMVNIESVRKYWKGIVGRAKPFDYRKNEDMVAWSATLKEIKTEDNPSDCLSQEIWGEATLKAKPWKAHGPDGLQGFWWKAFKTANAALYQLARRHLTTGDPLPEEWISEGRIILLHKSGPKHDPSNYRPIACLNTCYKLLTSYVALIVDRHVRRYNILPLEQVALRRGVWGCTHALMLDQTLVADAQYQKQRPISLAWIDYAKAFDSVPHAYIKWLLRVVKIPIMMRKFVCKLIGSWTVKYEAKDTRGCTHRSNSLSIKSGVLQGDSFSPLLFCLAMAPISYSLNSTKIGYGTVTGLSKGLQLKLSHLFYMDDLKLYADSRENLTKLLNRVEAISAAISMKLNTKKCAKAHFIPKRMGDDNKEESNSSEGCLDIPTLEGGSTYKYLGIEQTFGLHESDTWDRVEEKCSIVVRQIWESDLTFRQKVHSYNTKVIPALRYVVMNSVRGLGKYQSVLKRAEKFDIKTRRILVQLKVRYKASCVSRLYLATELGGYGLKSVRDALLEGTIYSWAYLCTSEELRTSLHLFSSMAGRSKRSVISDAGSVLKTYRIHAEPVSDAAAVIVAGTRFTDARALARYVMGEIRTGNNITRLKEWEVKELGGRVLRSGNIDRRASFVWLQTGKLSSTAVRNVIAAQEGCLLTRAHPSCVNVDKSCRGCGKSLETVEHLMTGCSKWLTTLYIDRHDSVARNLHYRICIKFDLKPPHYSQRVESVMENDRVKVYWGQPVQTKSIVRHNKPDIVVFEKKEQQCTIIEVAVSWFTGIARQIDVKTNRYCVNGNWEEVLQLPYPRGDNLQRELQTEGWKVKFLPVVIGACGEVLESLAVQISDALGISTDKAEDCIERMERSAVLGSSRIIKNHLSLG

SEQ ID NO: 630 - protein, 7 aa, synthetic construct
PKKKRKV

SEQ ID NO: 631 - protein, 16 aa, synthetic construct
KRPAATKKAGQAKKKK

SEQ ID NO: 632 - protein, 9 aa, synthetic construct
PAAKRVKLD

SEQ ID NO: 633 - protein, 11 aa, synthetic construct
RQRRNELKRSP

SEQ ID NO: 634 - protein, 38 aa, synthetic construct
NQSSNFGPMKGGNFGGRSSGPYGGGGQYFAKPRNQGGY

SEQ ID NO: 635 - protein, 42 aa, synthetic construct
RMRIZFKNKGKDTAELRRRRVEVSVELRKAKKDEQILKRRNV

SEQ ID NO: 636 - protein, 8 aa, synthetic construct
VSRKRPRP

SEQ ID NO: 637 - protein, 8 aa, synthetic construct
PPKKARED

SEQ ID NO: 638 - protein, 8 aa, synthetic construct
PQPKKKPL

SEQ ID NO: 639 - protein, 12 aa, synthetic construct
SALIKKKKKMAP

SEQ ID NO: 640 - protein, 5 aa, synthetic construct
DRLRR

SEQ ID NO: 641 - protein, 7 aa, synthetic construct
PKQKKRK

SEQ ID NO: 642 - protein, 10 aa, synthetic construct
RKLKKKIKKL

SEQ ID NO: 643 - protein, 10 aa, synthetic construct
REKKKFLKRR

SEQ ID NO: 644 - protein, 20 aa, synthetic construct
KRKGDEVDGVDEVAKKKSKK

SEQ ID NO: 645 - protein, 17 aa, synthetic construct
RKCLQAGMNLEARKTKK

SEQ ID NO: 646 - protein, 1134 aa, synthetic construct
  source 1..1134: note = MG3-6
MSTDMKNYRIGVDVGDRSVGLAAIEFDDDGLPIQKLALVTFRHDGGLDPTKNKTPMSRKETRGIARRTMRMNRERKRRLRNLDNVLENLGYSVPEGPEPETYEAWTSRALLASIKLASADELNEHLVRAVRHMARHRGWANPWWSLDQLEKASQEPSETFEIILARARELFGEKVPANPTLGMLGALAANNEVLLRPRDEKKRKTGYVRGTPLMFAQVRQGDQLAELRRICEVQGIEDQYEALRLGVFDHKHPYVPKERVGKDPLNPSTNRTIRASLEFQEFRILDSVANLRVRIGSRAKRELTEAEYDAAVEFLMDYADKEQPSWADVAEKIGVPGNRLVAPVLEDVQQKTAPYDRSSAAFEKAMGKKTEARQWWESTDDDQLRSLLIAFLVDATNDTEEAAAEAGLSELYKSWPAEEREALSNIDFEKGRVAYSQETLSKLSEYMHEYRVGLHEARKAVFGVDDTWRPPLDKLEEPTGQPAVDRVLTILRRFVLDCERQWGRPRAITVEHTRTGLMGPTQRQKILNEQKKNRADNERIRDELRESGVDNPSRAEVRRHLIVQEQECQCLYCGTMITTTTSELDHIVPRAGGGSSRRENLAAVCRACNAKKKRELFYAWAGPVKSQETIERVRQLKAFKDSKKAKMFKNQIRRLNQTEADEPIDERSLASTSYAAVAVRERLEQHFNEGLALDDKSRVVLDVYAGAVTRESRRAGGIDERILLRGERDKNRFDVRHHAVDAAVMTLLNRSVALTLEQRSQLRRTFYEQGLDKLDRNQLKPEEDWRDFTGLAPASQEKFLEWRKAATILGDLLAEAIEDDSIAVVSPLRLRPQNGSVHLETISAVKKQTLGSDWPADAVKRIVDPEIYLAMKDALGKLKELPEDSARSLELPDGRFVEADDEVLFFPENAASILTPRGVAEIGGSIHHARLYGWLTKKGELKVGMLRVYGAEFPWLMRESGSRNVLSMPIHRGSQSFRDMQDTTRKAVESGEAVEFAWITQNDELEFDPDDYIAHGGKDELRQFLGFMPECRWRVDGFKKNYQIRIRPAMLSREQLPSDIQRRLESKTLTKNESLLLKALDTGLVVAIGGLLPLETLKVIRRNNLGFPRWRGNGNLPTSFEVRSSALRALGVEG

SEQ ID NO: 647 - protein, 1280 aa, synthetic construct
  source 1..1280: note = MG29-1
MFNNFIKKYSLQKTLRFELKPVGETADYIEDFKSEYLKDTVLKDEQRAKDYQEIKTLIDDYHREYIEECLREPVDKKTGEILDFTQDLEDAFSYYQKLKENPTENRVGWEKEQESLRKKLVTSFVGNDGLFKKEFITRDLPEWLQKKGLWGEYKDTVENFKKFTTYFSGFHENRKNMYTAEAQSTAIANRLMNDNLPKFFNNYLAYQTIKEKHPDLVFRLDDALLQAAGVEHLDEAFQPRYFSRLFAQSGITAFNELIGGRTTENGEKIQGLNEQINLYRQQNPEKAKGFPRFMPLFKQILSDRETHSFLPDAFENDKELLQALRDYVDAATSEEGMISQLNKAMNQFVTADLKRVYIKSAALTSLSQELFHFFGVISDAIAWYAEKRLSPKKAQESFLKQEVYAIEELNQAVVGYIDQLEDQSELQQLLVDLPDPQKPVSSFILTHWQKSQEPLQAVIAKVEPLFELEELSKNKRAPKHDKDQGGEGFQQVDAIKNMLDAFMEVSHAIKPLYLVKGRKAIDMPDVDTGFYADFAEAYSAYEQVTVSLYNKTRNHLSKKPFSKDKIKINFDAPTLLNGWDLNKESDNKSIILRKDGNFYLAIMHPKHTKVFDCYSASEAAGKCYEKMNYKLLSGANKMLPKVFFSKKGIETFSPPQEILDLYKNNEHKKGATFKLESCHKLIDFFKRNIPKYKVHPTDNFGWDVFGFHFSPTSSYGDLSGFYREVEAQGYKLWFSDVSEAYINKCVEEGKLFLFQIYNKDFSPNSTGKPNLHTLYWKGLFEPENLKDVVLKLNGEAEIFYRKHSIKHEDKTIHRAKDPIANKNADNPKKQSVFDYDIIKDKRYTQDKFFFHVPISLNFKSQGVVRFNDKINGLLAAQDDVHVIGIDRGERHLLYYTVVNGKGEVVEQGSLNQVATDQGYVVDYQQKLHAKEKERDQARKNWSTIENIKELKAGYLSQVVHKLAQLIVKHNAIVCLEDLNFGFKRGRFKVEKQVYQKFEKALIDKLNYLVFKERGATQAGGYLNAYQLAAPFESFEKLGKQTGILYYVRSDYTSKIDPATGFVDFLKPKYESMAKSKVFFESFERIQWNQAKGYFEFEFDYKKMCPSRKFGDYRTRWVVCTFGDTRYQNRRNKSSGQWETETIDVTAQLKALFAAYGITYNQEDNIKDAIAAVKYTKFYKQLYWLLRLTLSLRHSVTGTDEDFILSPVADENGVFFDSRKATDKQPKDADANGAYHIALKGLWNLQQIRQHDWNVEKPKKLNLAMKNEEWFGFAQKKKFRA

SEQ ID NO: 648 - RNA, 4247 nt, synthetic construct
  source 1..4247: mol_type = other RNA; note = RNA template
gggagaatggtatttactctcgaagactttgtcggtgattggcggcaaactgctgggtataatttggatcaggtgctggagcaaggcggcgtcagcagcctgttccaaaacttgggagtctcagtgacgccaattcagcggatcgttctttccggggagaacggattgaaaattgatatacacgtaattattccatacgagggcctctccggtgatcagatgggtcaaattgagaagatattcaaagttgtttatcccgtaaaactgttcatccagctggtgcagacttacaaccagctctttgaagagaaccccatcaatgcaagcggagtcgatgccaaggccattctgtcagcccggctgtcaaagagccgcagacttgagaatcttatcgctcagctgccgggtgaaaagaaaaatggactgttcgggaacctgattgctctttcacttgggctgactcccaatttcaagtctaatttcgacctggcagaggatgccaagctgcaactgtccaaggacacctatgatgacgatctcgacaacctcctggcccagatcggtgaccaatacgccgaccttttccttgctgctaagaatctttctgacgccatcctgctgtctgacattctccgcgtgaacactgaaatcaccaaggcccctctttcagcttcaatgattaagcggtatgatgagcaccaccaggacctgaccctgcttaaggcactcgtccggcagcagcttccggagaagtacaaggaaatcttctttgaccagtcaaagaatggatacgccggctacatcgacggaggtgcctcccaagaggaattttataagtttatcaaacctatccttgagaagatggacggcaccgaagagctcctcgtgaaactgaatcgggaggatctgctgcggaagcagcgcactttcgacaatgggagcattccccaccagatccatcttggggagcttcacgccatccttcggcgccaagaggacttctacccctttcttaaggacaacagggagaagattgagaaaattctcactttccgcatcccctactacgtgggacccctcgccagaggaaatagccggtttgcttggatgaccagaaagtcagaagaaactatcactccctggaacttcgaagaggtggtggacaagggagccagcgctcagtcattcatcgaacggatgactaacttcgataagaacctccccaatgagaaggtcctgccgaaacattccctgctctacgagtactttaccgtgtacaacgagctgaccaaggtgaaatatgtcaccgaagggatgaggaagcccgcattcctgtcaggcgaacaaaagaaggcaattgtggaccttctgttcaagaccaatagaaaggtgaccgtgaagcagctgaaggaggactatttcaagaaaattgaatgcttcgactctgtggagattagcggggtcgaagatcggttcaacgcaagcctgggtacctaccatgatctgcttaagatcatcaaggacaaggattttctggacaatgaggagaacgaggacatccttgaggacattgtcctgactctcactctgttcgaggaccgggaaatgatcgaggagaggcttaagacctacgcccatctgttcgacgataaagtgatgaagcaacttaaacggagaagatataccggatggggacgccttagccgcaaactcatcaacggaatccgggacaaacagagcggaaagaccattcttgatttccttaagagcgacggattcgctaatcgcaacttcatgcaacttatccatgatgattccctgacctttaaggaggacatccagaaggcccaagtgtctggacaaggtgactcactgcacgagcatatcgcaaatctggctggttcacccgctattaagaagggtattctccagaccgtgaaagtcgtggacgagctggtcaaggtgatgggtcgccataaaccagagaacattgtcatcgagatggccagggaaaaccagactacccagaagggacagaagaacagcagggagcggatgaaaagaattgaggaagggattaaggagctcgggtcacagatccttaaagagcacccggtggaaaacacccagcttcagaatgagaagctctatctgtactaccttcaaaatggacgcgatatgtatgtggaccaagagcttgatatcaacaggctctcagactacgacgtggacgccatcgtccctcagagcttcctcaaagacgactcaattgacaataaggtgctgactcgctcagacaagaaccggggaaagtcagataacgtgccctcagaggaagtcgtgaaaaagatgaagaactattggcgccagcttctgaacgcaaagctgatcactcagcggaagttcgacaatctcactaaggctgagaggggcggactgagcgaactggacaaagcaggattcattaaacggcaacttgtggagactcggcagattactaaacatgtcgcccaaatccttgactcacgcatgaataccaagtacgacgaaaacgacaaacttatccgcgaggtgaaggtgattaccctgaagtccaagctggtcagcgatttcagaaaggactttcaattctacaaagtgcgggagatcaataactatcatcatgctcatgacgcatatctgaatgccgtggtgggaaccgccctgatcaagaagtacccaaagctggaaagcgagttcgtgtacggagactacaaggtctacgacgtgcgcaagatgattgccaaatctgagcaggagatcggaaaggccaccgcaaagtacttcttctacagcaacatcatgaatttcttcaagaccgaaatcacccttgcaaacggtgagatccggaagaggccgctcatcgagactaatggggagactggcgaaatcgtgtgggacaagggcagagatttcgctaccgtgcgcaaagtgctttctatgcctcaagtgaacatcgtgaagaaaaccgaggtgcaaaccggaggcttttctaaggaatcaatcctccccaagcgcaactccgacaagctcattgcaaggaagaaggattgggaccctaagaagtacggcggattcgattcaccaactgtggcttattctgtcctggtcgtggctaaggtggaaaaaggaaagtctaagaagctcaagagcgtgaaggaactgctgggtatcaccattatggagcgcagctccttcgagaagaacccaattgactttctcgaagccaaaggttacaaggaagtcaagaaggaccttatcatcaagctcccaaagtatagcctgttcgaactggagaatgggcggaagcggatgctcgcctccgctggcgaacttcagaagggtaatgagctggctctcccctccaagtacgtgaatttcctctaccttgcaagccattacgagaagctgaaggggagccccgaggacaacgagcaaaagcaactgtttgtggagcagcataagcattatctggacgagatcattgagcagatttccgagttttctaaacgcgtcattctcgctgatgccaacctcgataaagtccttagcgcatacaataagcacagagacaaaccaattcgggagcaggctgagaatatcatccacctgttcaccctcaccaatcttggtgcccctgccgcattcaagtacttcgacaccaccatcgaccggaaacgctatacctccaccaaagaagtgctggacgccaccctcatccaccagagcatcaccggactttacgaaactcggattgacctctcacagctcggaggggatgacgaccaccatttcaaagtcattctccattacggtacgttagtcattgatggcgtcacccctaatatgatagattactttggccgtccctacgagggaattgctgtgtttgatgggaagaaaattacagtgaccggaactctttggaatgggaataagatcattgatgaaagacttataaatcctgatgggagtctcctctttagagtgacaattaatggggtaacaggatggagactctgtgagcggatcttggcttagcccaaacccaaacccaaacctttagagctaggccaacatgaggattacccatgtctgcagggcctagcaagttaaaataaggctagtccgttatcaacttggccaggactgaggattacccagtctatctgcagggccaagtaaaaaaaaaaggaagggaaaagggg

SEQ ID NO: 649-652 - skipped (4 entries)

SEQ ID NO: 653 - DNA, 3402 bp, synthetic construct
  source 1..3402: mol_type = other DNA; note = MG3-6(H586A)
atgtcaacggacatgaagaactatcgtatcggggtcgacgtgggtgatcgaagcgtaggcctcgcagcgattgaatttgacgatgacggactgcctatacagaaactcgcattagtcaccttccgtcacgatggtggtctggatcctactaagaacaagacccctatgagtcgcaaggagacgcggggaatagccaggagaaccatgcgaatgaacagagagcggaaaagacggctccgtaacctggacaatgttttagaaaacttgggctactcagtcccggaaggaccagaacctgagacatatgaagcctggacctctcgggctcttctggcatccattaagctcgcaagtgccgatgagctgaatgaacatttggttagagcggtcagacatatggctcgacacaggggatgggccaatccgtggtggtctttagatcagctcgaaaaggctagtcaggagccaagcgagacattcgagatcatcctggcacgcgctagggagctgttcggagaaaaggtgcccgctaaccctacattaggtatgctgggcgccttagcggctaacaatgaggtactgcttcgacccagggacgagaagaaacgaaagaccggctacgtgagaggtacacccttaatgttcgcgcaggtcaggcagggagatcagctcgcggagctccgtcgaatctgcgaagttcaagggatcgaagatcaatatgaagctctgagattaggggtgttcgatcacaagcacccttacgtccctaaggaacgcgtcggaaaagacccactgaatccgagcacgaaccggaccatccgggctagtttggagttccaggaatttagaatattagattccgttgctaacctgagggtgagaatcggctcccgagctaaacgggagcttaccgaggcagagtacgacgcggccgtcgaatttcttatggattacgccgacaaggagcagccttcctgggctgacgttgcagagaaaatcggcgtacctggtaacaggctggtggcacccgtgttagaggacgtgcagcagaaaactgctccctatgataggtcttccgcggcatttgaaaaggcaatgggaaagaagaccgaagccagacagtggtgggaaagcactgatgatgaccaactgcggagtctcctgattgctttcctggtcgacgccaccaatgataccgaggaagcagcggcagaagccggacttagtgagttatataaatcatggcccgccgaggagagggaagcactctctaatatcgacttcgaaaagggaagagtggcctactcacaggaaaccttgagcaagttgtccgaatacatgcacgaataccgagttggcttgcatgaggccagaaaggctgtctttggggtcgacgatacatggcgcccaccacttgataaactggaagagcctacaggacagcctgctgtcgaccgcgttcttacaatactcaggcggttcgtgctggactgcgagcgccagtggggtcggcccagagccatcaccgtcgagcatacaaggactggattgatgggaccaacgcagcggcagaaaattcttaacgaacagaagaagaatcgggctgacaatgagcgtatccgcgacgaacttcgggaaagcggggtagataacccatcacgggcggaagttcggcgtcatttgatagtgcaagaacaggagtgccagtgtctgtattgtgggacaatgatcaccactaccactagtgaactggacgccatagtgccgcgggccggtggcggctcaagtaggcgtgagaacttggccgccgtctgtcgcgcttgtaatgccaagaagaaaagggagttattttatgcatgggccgggccggtgaagtcccaggagactatcgagagggtgagacagcttaaagccttcaaagactccaagaaagccaagatgtttaagaatcagatccgacgattaaatcagaccgaagcagatgaaccgatagacgagcgttctcttgcatccacttcatacgccgcagtcgctgtcagggagcggttagaacaacattttaacgagggtctggcacttgatgataaatcccgagtggtactggacgtgtatgccggcgctgtgacaagagagagtcgccgggcgggcgggatcgacgagcggattttattaaggggcgaacgggataagaaccgattcgacgttaggcaccatgcagtcgacgctgcagtgatgacactgcttaataggtccgtggcactgaccctggagcaacgtagccagctgcggcgcacattctatgaacagggactggacaagctggaccgcaatcaacttaagcctgaagaggactggagagatttcaccggcctggcccctgcatcccaggagaaattcttggagtggcggaaagctgccacaattctcggagacttgctggctgaggcaatagaagatgacagcattgcggttgtatcaccactccgccttagaccccagaacggatctgtgcaccttgaaaccatatccgctgtgaagaagcagacactcggttccgattggccagccgatgccgttaagagaatcgtggaccctgaaatttatcttgccatgaaagacgctctgggcaagctgaaggagctcccagaagactctgcacgaagcctggaactgccagatgggcgcttcgttgaagccgacgacgaagtcttgttcttccccgagaacgccgcatctattctgacacctcgcggggttgctgagattggtgggtcaatacaccacgcacggctctacggctggctgaccaagaagggagaactgaaggtagggatgcttagagtctacggggccgagttcccttggctgatgagggaaagtgggagccgaaacgttctgtccatgccaattcaccggggcagtcagtctttcagagatatgcaagatacaactaggaaggcggtggagagcggcgaagccgtcgagttcgcatggatcacacagaatgacgagctcgaatttgacccggatgactatatcgcccacggcggtaaggacgaactgcggcagttcctcgggttcatgccagagtgccggtggagagtcgatggctttaagaagaattatcagatcagaatcagaccagccatgctgtcacgagaacagctgccatccgatatacagaggcggctggagtctaaaacactgaccaagaatgaaagcttgctgctcaaggctcttgacacgggactcgtggttgcgatcggcggacttctcccattagaaaccttgaaggtgatacggcgaaacaatcttggatttcccagatggcgcggcaatggaaatcttccgacatcttttgaggtacgcagctccgctctccgagccctgggagtagaaggt

SEQ ID NO: 654 - DNA, 250 bp, synthetic construct
  source 1..250: mol_type = other DNA; note = AAVS1_target_amplified_ngs
cgtctaacccccacctcctgttaggcagattccttatctggtgacacacccccatttcctggagccatctctctccttgccagaacctctaaggtttgcttacgatggagccagagaggatcctgggagggagacttggcagggggtgggagggaagggggggatgcgtgacctgcccggttctcagtggccaccctgcgctaccctctcccagaacctgagctgctctgacgcggctgtctggtgcgtt

SEQ ID NO: 655 - DNA, 233 bp, synthetic construct
  source 1..233: mol_type = other DNA; note = B2M_target_amplified_ngs
acgcgcgctacttgcccctttcggcggggagcaggggagacctttggcctacggcgacgggagggtcgggacaaagtttagggcgtcgataagcgtcagagcgccgaggttgggggagggtttctcttccgctctttcgcggggcctctggctcccccagcgcagctggagtgggggacgggtaggctcgtcccaaaggcgcggcgctgaggtttgtgaacgcgtggaggggc

SEQ ID NO: 656-659 - skipped (4 entries)

SEQ ID NO: 660 - RNA, 134 nt, synthetic construct; identical to SEQ ID NO: 80
  source 1..134: mol_type = other RNA; note = VEGFA_G_to_T_change_PBS10
  modified_base 1..3: mod_base = OTHER; note = 2'O-methyl ribonucleotide
  modified_base 1..4: mod_base = OTHER; note = phosphorothioate linkage
  modified_base 132..134: mod_base = OTHER; note = 2'O-methyl ribonucleotide
  modified_base 131..134: mod_base = OTHER; note = phosphorothioate linkage

SEQ ID NO: 661 - RNA, 137 nt, synthetic construct; identical to SEQ ID NO: 81
  source 1..137: mol_type = other RNA; note = VEGFA_G_to_T_change_PBS13
  modified_base 1..3: mod_base = OTHER; note = 2'O-methyl ribonucleotide
  modified_base 1..4: mod_base = OTHER; note = phosphorothioate linkage
  modified_base 135..137: mod_base = OTHER; note = 2'O-methyl ribonucleotide
  modified_base 134..137: mod_base = OTHER; note = phosphorothioate linkage

SEQ ID NO: 662 - skipped

SEQ ID NO: 663 - RNA, 144 nt, synthetic construct; identical to SEQ ID NO: 83
  source 1..144: mol_type = other RNA; note = VEGFA_G_to_T_change_PBS20
  modified_base 1..3: mod_base = OTHER; note = 2'O-methyl ribonucleotide
  modified_base 1..4: mod_base = OTHER; note = phosphorothioate linkage
  modified_base 142..144: mod_base = OTHER; note = 2'O-methyl ribonucleotide
  modified_base 141..144: mod_base = OTHER; note = phosphorothioate linkage

SEQ ID NO: 664-666 - skipped (3 entries)

SEQ ID NO: 667 - RNA, 133 nt, synthetic construct; identical to SEQ ID NO: 87
  source 1..133: mol_type = other RNA; note = VEGFA_deletion_change_PBS8
  modified_base 1..3: mod_base = OTHER; note = 2'O-methyl ribonucleotide
  modified_base 1..4: mod_base = OTHER; note = phosphorothioate linkage
  modified_base 131..133: mod_base = OTHER; note = 2'O-methyl ribonucleotide
  modified_base 130..133: mod_base = OTHER; note = phosphorothioate linkage

SEQ ID NO: 668 - RNA, 135 nt, synthetic construct; identical to SEQ ID NO: 88
  source 1..135: mol_type = other RNA; note = VEGFA_deletion_change_PBS10
  modified_base 1..3: mod_base = OTHER; note = 2'O-methyl ribonucleotide
  modified_base 1..4: mod_base = OTHER; note = phosphorothioate linkage
  modified_base 133..135: mod_base = OTHER; note = 2'O-methyl ribonucleotide
  modified_base 132..135: mod_base = OTHER; note = phosphorothioate linkage

SEQ ID NO: 669 - RNA, 138 nt, synthetic construct; identical to SEQ ID NO: 89
  source 1..138: mol_type = other RNA; note = VEGFA_deletion_change_PBS13
  modified_base 1..3: mod_base = OTHER; note = 2'O-methyl ribonucleotide
  modified_base 1..4: mod_base = OTHER; note = phosphorothioate linkage
  modified_base 136..138: mod_base = OTHER; note = 2'O-methyl ribonucleotide
  modified_base 135..138: mod_base = OTHER; note = phosphorothioate linkage

SEQ ID NO: 670 - RNA, 141 nt, synthetic construct; identical to SEQ ID NO: 90
  source 1..141: mol_type = other RNA; note = VEGFA_deletion_change_PBS16
  modified_base 1..3: mod_base = OTHER; note = 2'O-methyl ribonucleotide
  modified_base 1..4: mod_base = OTHER; note = phosphorothioate linkage
  modified_base 139..141: mod_base = OTHER; note = 2'O-methyl ribonucleotide
  modified_base 138..141: mod_base = OTHER; note = phosphorothioate linkage

SEQ ID NO: 671 - RNA, 145 nt, synthetic construct; identical to SEQ ID NO: 91
  source 1..145: mol_type = other RNA; note = VEGFA_deletion_change_PBS20
  modified_base 1..3: mod_base = OTHER; note = 2'O-methyl ribonucleotide
  modified_base 1..4: mod_base = OTHER; note = phosphorothioate linkage
  modified_base 143..145: mod_base = OTHER; note = 2'O-methyl ribonucleotide
  modified_base 142..145: mod_base = OTHER; note = phosphorothioate linkage

SEQ ID NO: 672 - RNA, 151 nt, synthetic construct; identical to SEQ ID NO: 92
  source 1..151: mol_type = other RNA; note = VEGFA_insertion_change_PBS2
  modified_base 1..3: mod_base = OTHER; note = 2'O-methyl ribonucleotide
  modified_base 1..4: mod_base = OTHER; note = phosphorothioate linkage
  modified_base 149..151: mod_base = OTHER; note = 2'O-methyl ribonucleotide
  modified_base 148..151: mod_base = OTHER; note = phosphorothioate linkage

SEQ ID NO: 673 - RNA, 153 nt, synthetic construct; identical to SEQ ID NO: 93
  source 1..153: mol_type = other RNA; note = VEGFA_insertion_change_PBS4
  modified_base 1..3: mod_base = OTHER; note = 2'O-methyl ribonucleotide
  modified_base 1..4: mod_base = OTHER; note = phosphorothioate linkage
  modified_base 151..153: mod_base = OTHER; note = 2'O-methyl ribonucleotide
  modified_base 150..153: mod_base = OTHER; note = phosphorothioate linkage

SEQ ID NO: 674 - RNA, 155 nt, synthetic construct; identical to SEQ ID NO: 94
  source 1..155: mol_type = other RNA; note = VEGFA_insertion_change_PBS6
  modified_base 1..3: mod_base = OTHER; note = 2'O-methyl ribonucleotide
  modified_base 1..4: mod_base = OTHER; note = phosphorothioate linkage
  modified_base 153..155: mod_base = OTHER; note = 2'O-methyl ribonucleotide
  modified_base 152..155: mod_base = OTHER; note = phosphorothioate linkage

SEQ ID NO: 675 - RNA, 157 nt, synthetic construct; identical to SEQ ID NO: 95
  source 1..157: mol_type = other RNA; note = VEGFA_insertion_change_PBS8
  modified_base 1..3: mod_base = OTHER; note = 2'O-methyl ribonucleotide
  modified_base 1..4: mod_base = OTHER; note = phosphorothioate linkage
  modified_base 155..157: mod_base = OTHER; note = 2'O-methyl ribonucleotide
  modified_base 154..157: mod_base = OTHER; note = phosphorothioate linkage

SEQ ID NO: 676 - RNA, 159 nt, synthetic construct; identical to SEQ ID NO: 96
  source 1..159: mol_type = other RNA; note = VEGFA_insertion_change_PBS10
  modified_base 1..3: mod_base = OTHER; note = 2'O-methyl ribonucleotide
  modified_base 1..4: mod_base = OTHER; note = phosphorothioate linkage
  modified_base 157..159: mod_base = OTHER; note = 2'O-methyl ribonucleotide
  modified_base 156..159: mod_base = OTHER; note = phosphorothioate linkage

SEQ ID NO: 677 - RNA, 162 nt, synthetic construct; identical to SEQ ID NO: 97
  source 1..162: mol_type = other RNA; note = VEGFA_insertion_change_PBS13
  modified_base 1..3: mod_base = OTHER; note = 2'O-methyl ribonucleotide
  modified_base 1..4: mod_base = OTHER; note = phosphorothioate linkage
  modified_base 160..162: mod_base = OTHER; note = 2'O-methyl ribonucleotide
  modified_base 159..162: mod_base = OTHER; note = phosphorothioate linkage

SEQ ID NO: 678 - RNA, 165 nt, synthetic construct; identical to SEQ ID NO: 98
  source 1..165: mol_type = other RNA; note = VEGFA_insertion_change_PBS16
  modified_base 1..3: mod_base = OTHER; note = 2'O-methyl ribonucleotide
  modified_base 1..4: mod_base = OTHER; note = phosphorothioate linkage
  modified_base 163..165: mod_base = OTHER; note = 2'O-methyl ribonucleotide
  modified_base 162..165: mod_base = OTHER; note = phosphorothioate linkage

SEQ ID NO: 679 - RNA, 169 nt, synthetic construct; identical to SEQ ID NO: 99
  source 1..169: mol_type = other RNA; note = VEGFA_insertion_change_PBS20
  modified_base 1..3: mod_base = OTHER; note = 2'O-methyl ribonucleotide
  modified_base 1..4: mod_base = OTHER; note = phosphorothioate linkage
  modified_base 167..169: mod_base = OTHER; note = 2'O-methyl ribonucleotide
  modified_base 166..169: mod_base = OTHER; note = phosphorothioate linkage

SEQ ID NO: 680 - RNA, 129 nt, synthetic construct; identical to SEQ ID NO: 109
  source 1..129: mol_type = other RNA; note = AAVS1_PBS_2
  modified_base 1..3: mod_base = OTHER; note = 2'O-methyl ribonucleotide
  modified_base 1..4: mod_base = OTHER; note = phosphorothioate linkage
  modified_base 127..129: mod_base = OTHER; note = 2'O-methyl ribonucleotide
  modified_base 126..129: mod_base = OTHER; note = phosphorothioate linkage

SEQ ID NO: 681 - RNA, 131 nt, synthetic construct; identical to SEQ ID NO: 110
  source 1..131: mol_type = other RNA; note = AAVS1_PBS_4
  modified_base 1..3: mod_base = OTHER; note = 2'O-methyl ribonucleotide
  modified_base 1..4: mod_base = OTHER; note = phosphorothioate linkage
  modified_base 129..131: mod_base = OTHER; note = 2'O-methyl ribonucleotide
  modified_base 128..131: mod_base = OTHER; note = phosphorothioate linkage

SEQ ID NO: 682 - RNA, 135 nt, synthetic construct; identical to SEQ ID NO: 111
  source 1..135: mol_type = other RNA; note = AAVS1_PBS_8
  modified_base 1..3: mod_base = OTHER; note = 2'O-methyl ribonucleotide
  modified_base 1..4: mod_base = OTHER; note = phosphorothioate linkage
  modified_base 133..135: mod_base = OTHER; note = 2'O-methyl ribonucleotide
  modified_base 132..135: mod_base = OTHER; note = phosphorothioate linkage

SEQ ID NO: 683 - RNA, 137 nt, synthetic construct; identical to SEQ ID NO: 112
  source 1..137: mol_type = other RNA; note = AAVS1_PBS_10
  modified_base 1..3: mod_base = OTHER; note = 2'O-methyl ribonucleotide
  modified_base 1..4: mod_base = OTHER; note = phosphorothioate linkage
  modified_base 135..137: mod_base = OTHER; note = 2'O-methyl ribonucleotide
  modified_base 134..137: mod_base = OTHER; note = phosphorothioate linkage

SEQ ID NO: 684 - RNA, 140 nt, synthetic construct; identical to SEQ ID NO: 113
  source 1..140: mol_type = other RNA; note = AAVS1_PBS_13
  modified_base 1..3: mod_base = OTHER; note = 2'O-methyl ribonucleotide
  modified_base 1..4: mod_base = OTHER; note = phosphorothioate linkage
  modified_base 138..140: mod_base = OTHER; note = 2'O-methyl ribonucleotide
  modified_base 137..140: mod_base = OTHER; note = phosphorothioate linkage

SEQ ID NO: 685 - RNA, 143 nt, synthetic construct; identical to SEQ ID NO: 114
  source 1..143: mol_type = other RNA; note = AAVS1_PBS_16
  modified_base 1..3: mod_base = OTHER; note = 2'O-methyl ribonucleotide
  modified_base 1..4: mod_base = OTHER; note = phosphorothioate linkage
  modified_base 141..143: mod_base = OTHER; note = 2'O-methyl ribonucleotide
  modified_base 140..143: mod_base = OTHER; note = phosphorothioate linkage

SEQ ID NO: 686 - RNA, 147 nt, synthetic construct; identical to SEQ ID NO: 115
  source 1..147: mol_type = other RNA; note = AAVS1_PBS_20
  modified_base 1..3: mod_base = OTHER; note = 2'O-methyl ribonucleotide
  modified_base 1..4: mod_base = OTHER; note = phosphorothioate linkage
  modified_base 145..147: mod_base = OTHER; note = 2'O-methyl ribonucleotide
  modified_base 144..147: mod_base = OTHER; note = phosphorothioate linkage

SEQ ID NO: 687-689 - skipped (3 entries)

SEQ ID NO: 690 - RNA, 135 nt, synthetic construct; identical to SEQ ID NO: 119
  source 1..135: mol_type = other RNA; note = B2M_PBS_8
  modified_base 1..3: mod_base = OTHER; note = 2'O-methyl ribonucleotide
  modified_base 1..4: mod_base = OTHER; note = phosphorothioate linkage
  modified_base 133..135: mod_base = OTHER; note = 2'O-methyl ribonucleotide
  modified_base 132..135: mod_base = OTHER; note = phosphorothioate linkage

SEQ ID NO: 691 - RNA, 137 nt, synthetic construct; identical to SEQ ID NO: 120
  source 1..137: mol_type = other RNA; note = B2M_PBS_10
  modified_base 1..3: mod_base = OTHER; note = 2'O-methyl ribonucleotide
  modified_base 1..4: mod_base = OTHER; note = phosphorothioate linkage
  modified_base 135..137: mod_base = OTHER; note = 2'O-methyl ribonucleotide
  modified_base 134..137: mod_base = OTHER; note = phosphorothioate linkage

SEQ ID NO: 692 - RNA, 140 nt, synthetic construct; identical to SEQ ID NO: 121
  source 1..140: mol_type = other RNA; note = B2M_PBS_13
  modified_base 1..3: mod_base = OTHER; note = 2'O-methyl ribonucleotide
  modified_base 1..4: mod_base = OTHER; note = phosphorothioate linkage
  modified_base 138..140: mod_base = OTHER; note = 2'O-methyl ribonucleotide
  modified_base 137..140: mod_base = OTHER; note = phosphorothioate linkage

SEQ ID NO: 693 - RNA, 143 nt, synthetic construct; identical to SEQ ID NO: 122
  source 1..143: mol_type = other RNA; note = B2M_PBS_16
  modified_base 1..3: mod_base = OTHER; note = 2'O-methyl ribonucleotide
  modified_base 1..4: mod_base = OTHER; note = phosphorothioate linkage
  modified_base 141..143: mod_base = OTHER; note = 2'O-methyl ribonucleotide
  modified_base 140..143: mod_base = OTHER; note = phosphorothioate linkage

SEQ ID NO: 694 - RNA, 147 nt, synthetic construct; identical to SEQ ID NO: 123
  source 1..147: mol_type = other RNA; note = B2M_PBS_20
  modified_base 1..3: mod_base = OTHER; note = 2'O-methyl ribonucleotide
  modified_base 1..4: mod_base = OTHER; note = phosphorothioate linkage
  modified_base 145..147: mod_base = OTHER; note = 2'O-methyl ribonucleotide
  modified_base 144..147: mod_base = OTHER; note = phosphorothioate linkage

SEQ ID NO: 695 - skipped

SEQ ID NO: 696 - RNA, 105 nt, synthetic construct
  source 1..105: mol_type = other RNA; note = Non-targeting Cas9 guide RNA
  modified_base 1..3: mod_base = OTHER; note = 2'O-methyl ribonucleotide
  modified_base 1..4: mod_base = OTHER; note = phosphorothioate linkage
  modified_base 103..105: mod_base = OTHER; note = 2'O-methyl ribonucleotide
  modified_base 102..105: mod_base = OTHER; note = phosphorothioate linkage
gggatccaccggagcttaagacgttttagagctagaaatagcaagttaaaataaggctagtccgttatcaacttgaaaaagtggcaccgagtcggtgcttttttt

SEQ ID NO: 697 - RNA, 103 nt, synthetic construct
  source 1..103: mol_type = other RNA; note = VEGFA targeting Cas9 guide RNA
  modified_base 1..3: mod_base = OTHER; note = 2'O-methyl ribonucleotide
  modified_base 1..4: mod_base = OTHER; note = phosphorothioate linkage
  modified_base 101..103: mod_base = OTHER; note = 2'O-methyl ribonucleotide
  modified_base 100..103: mod_base = OTHER; note = phosphorothioate linkage
gatgtctgcaggccagatgagttttagagctagaaatagcaagttaaaataaggctagtccgttatcaacttgaaaaagtggcaccgagtcggtgcttttttt

SEQ ID NO: 698 - DNA, 41 bp, synthetic construct
  source 1..41: mol_type = other DNA; note = AAVS1_forward_primer
gctcttccgatctnnnnncgtctaacccccacctcctgtta

SEQ ID NO: 699 - DNA, 39 bp, synthetic construct
  source 1..39: mol_type = other DNA; note = AAVS1_reverse_primer
gctcttccgatctnnnnnaacgcaccagacagccgcgtc

SEQ ID NO: 700 - DNA, 39 bp, synthetic construct
  source 1..39: mol_type = other DNA; note = B2M_forward_primer
gctcttccgatctnnnnnacgcgcgctacttgccccttt

SEQ ID NO: 701 - DNA, 39 bp, synthetic construct
  source 1..39: mol_type = other DNA; note = B2M_reverse_primer
gctcttccgatctnnnnngcccctccacgcgttcacaaa

SEQ ID NO: 702 - DNA, 4879 bp, synthetic construct
  source 1..4879: mol_type = other DNA; note = MG160-4_cloned_into_tethered_MG3-6(H586A)plasmid
atgcctaagaagaaacgaaaggttatgtcaacggacatgaagaactatcgtatcggggtcgacgtgggtgatcgaagcgtaggcctcgcagcgattgaatttgacgatgacggactgcctatacagaaactcgcattagtcaccttccgtcacgatggtggtctggatcctactaagaacaagacccctatgagtcgcaaggagacgcggggaatagccaggagaaccatgcgaatgaacagagagcggaaaagacggctccgtaacctggacaatgttttagaaaacttgggctactcagtcccggaaggaccagaacctgagacatatgaagcctggacctctcgggctcttctggcatccattaagctcgcaagtgccgatgagctgaatgaacatttggttagagcggtcagacatatggctcgacacaggggatgggccaatccgtggtggtctttagatcagctcgaaaaggctagtcaggagccaagcgagacattcgagatcatcctggcacgcgctagggagctgttcggagaaaaggtgcccgctaaccctacattaggtatgctgggcgccttagcggctaacaatgaggtactgcttcgacccagggacgagaagaaacgaaagaccggctacgtgagaggtacacccttaatgttcgcgcaggtcaggcagggagatcagctcgcggagctccgtcgaatctgcgaagttcaagggatcgaagatcaatatgaagctctgagattaggggtgttcgatcacaagcacccttacgtccctaaggaacgcgtcggaaaagacccactgaatccgagcacgaaccggaccatccgggctagtttggagttccaggaatttagaatattagattccgttgctaacctgagggtgagaatcggctcccgagctaaacgggagcttaccgaggcagagtacgacgcggccgtcgaatttcttatggattacgccgacaaggagcagccttcctgggctgacgttgcagagaaaatcggcgtacctggtaacaggctggtggcacccgtgttagaggacgtgcagcagaaaactgctccctatgataggtcttccgcggcatttgaaaaggcaatgggaaagaagaccgaagccagacagtggtgggaaagcactgatgatgaccaactgcggagtctcctgattgctttcctggtcgacgccaccaatgataccgaggaagcagcggcagaagccggacttagtgagttatataaatcatggcccgccgaggagagggaagcactctctaatatcgacttcgaaaagggaagagtggcctactcacaggaaaccttgagcaagttgtccgaatacatgcacgaataccgagttggcttgcatgaggccagaaaggctgtctttggggtcgacgatacatggcgcccaccacttgataaactggaagagcctacaggacagcctgctgtcgaccgcgttcttacaatactcaggcggttcgtgctggactgcgagcgccagtggggtcggcccagagccatcaccgtcgagcatacaaggactggattgatgggaccaacgcagcggcagaaaattcttaacgaacagaagaagaatcgggctgacaatgagcgtatccgcgacgaacttcgggaaagcggggtagataacccatcacgggcggaagttcggcgtcatttgatagtgcaagaacaggagtgccagtgtctgtattgtgggacaatgatcaccactaccactagtgaactggacgccatagtgccgcgggccggtggcggctcaagtaggcgtgagaacttggccgccgtctgtcgcgcttgtaatgccaagaagaaaagggagttattttatgcatgggccgggccggtgaagtcccaggagactatcgagagggtgagacagcttaaagccttcaaagactccaagaaagccaagatgtttaagaatcagatccgacgattaaatcagaccgaagcagatgaaccgatagacgagcgttctcttgcatccacttcatacgccgcagtcgctgtcagggagcggttagaacaacattttaacgagggtctggcacttgatgataaatcccgagtggtactggacgtgtatgccggcgctgtgacaagagagagtcgccgggcgggcgggatcgacgagcggattttattaaggggcgaacgggataagaaccgattcgacgttaggcaccatgcagtcgacgctgcagtgatgacactgcttaataggtccgtggcactgaccctggagcaacgtagccagctgcggcgcacattctatgaacagggactggacaagctggaccgcaatcaacttaagcctgaagaggactggagagatttcaccggcctggcccctgcatcccaggagaaattcttggagtggcggaaagctgccacaattctcggagacttgctggctgaggcaatagaagatgacagcattgcggttgtatcaccactccgccttagaccccagaacggatctgtgcaccttgaaaccatatccgctgtgaagaagcagacactcggttccgattggccagccgatgccgttaagagaatcgtggaccctgaaatttatcttgccatgaaagacgctctgggcaagctgaaggagctcccagaagactctgcacgaagcctggaactgccagatgggcgcttcgttgaagccgacgacgaagtcttgttcttccccgagaacgccgcatctattctgacacctcgcggggttgctgagattggtgggtcaatacaccacgcacggctctacggctggctgaccaagaagggagaactgaaggtagggatgcttagagtctacggggccgagttcccttggctgatgagggaaagtgggagccgaaacgttctgtccatgccaattcaccggggcagtcagtctttcagagatatgcaagatacaactaggaaggcggtggagagcggcgaagccgtcgagttcgcatggatcacacagaatgacgagctcgaatttgacccggatgactatatcgcccacggcggtaaggacgaactgcggcagttcctcgggttcatgccagagtgccggtggagagtcgatggctttaagaagaattatcagatcagaatcagaccagccatgctgtcacgagaacagctgccatccgatatacagaggcggctggagtctaaaacactgaccaagaatgaaagcttgctgctcaaggctcttgacacgggactcgtggttgcgatcggcggacttctcccattagaaaccttgaaggtgatacggcgaaacaatcttggatttcccagatggcgcggcaatggaaatcttccgacatcttttgaggtacgcagctccgctctccgagccctgggagtagaaggttctggcggcagcagcggcggctcaagcggaagtgaaacacctggaacttccgaaagcgctacgcctgaatcttctggtggatcttctggcggatcttccgcatgcgttacccagaagtggacccatcgataccagttgaaacccggccgatgggtttttgcccccacagatgaggccaagaagtgcggtgctcacattaagcgcagcgtggcttccaggtggaaggccccaaacttctactatcacctcagaaatggcgggcacgttgcggccgtacggtcccacgaactgagccggtttttcttccgggcagatttggacgatttctttgggagagtgaaccggtctcgcgtgacccggtgccttaaaccttggttctcatacgccgaagcaagggagatggcctcagaatctgtcgtgaagcgacctggagagacagcctttgtgctgccgtatgggttcgtgcagagccctatcctcgcatccttggccctggacaagagtaaactgggtagcctgctgagatcactggacgggggccgcgatttcacggtgagcgtctatgtcgacgacatcattatctctggagacgacgaagctcaacttaaagaggtagcatcccgccttgagagagtggcgagtgaggccctgtttccactcagcagtggcaaaactcagggacccgcctctggagtgactgtttttaacatagaactgtcccatagaatgctcaggattaccgatgataggctcgcttcactgaggctcgactatcaggcgactgcatctgagcattgtaaagctggcatcgtctcctacgtatacagtgtgaatccagatcaggtcgctcaagtgacacctaggggcggcggaggcagctacccctatgatgtacctgattatgcttctggcggacccaagaagaagaggaaagtcggtggttctcctaagaaaaagagaaaggtcggatccggcgccaccaattttagccttttaaagcaggctggcgacgttgaggaaaacccggggcccatggaccaagccaaacccctgagccaagaggagtctacactgatcgagcgggccaccgcaaccattaatagtattccaattagtgaggattattctgtggcatccgccgcattatccagtgatgggcgtattttcaccggcgttaacgtgtaccacttcaccggcggcccctgcgcagagctggtcgttttgggtacagcagcagcagcagccgccgggaatctcacctgcattgtggcaataggcaacgaaaatcggggaattttatcaccgtgtggtcgttgtcgccaagttctgcttgacctgcaccccggcattaaggcaatcgttaaagattccgacggccaacccacagctgtcggcatacgagagttacttccaagcggatacgtttgggaaggatagggatccgcaggcctct

SEQ ID NO: 703 - DNA, 4863 bp, synthetic construct
  source 1..4863: mol_type = other DNA; note = MG160-4_cloned_into_tethered_MG3-6(H586A)plasmid
atgcctaagaagaaacgaaaggttgttacccagaagtggacccatcgataccagttgaaacccggccgatgggtttttgcccccacagatgaggccaagaagtgcggtgctcacattaagcgcagcgtggcttccaggtggaaggccccaaacttctactatcacctcagaaatggcgggcacgttgcggccgtacggtcccacgaactgagccggtttttcttccgggcagatttggacgatttctttgggagagtgaaccggtctcgcgtgacccggtgccttaaaccttggttctcatacgccgaagcaagggagatggcctcagaatctgtcgtgaagcgacctggagagacagcctttgtgctgccgtatgggttcgtgcagagccctatcctcgcatccttggccctggacaagagtaaactgggtagcctgctgagatcactggacgggggccgcgatttcacggtgagcgtctatgtcgacgacatcattatctctggagacgacgaagctcaacttaaagaggtagcatcccgccttgagagagtggcgagtgaggccctgtttccactcagcagtggcaaaactcagggacccgcctctggagtgactgtttttaacatagaactgtcccatagaatgctcaggattaccgatgataggctcgcttcactgaggctcgactatcaggcgactgcatctgagcattgtaaagctggcatcgtctcctacgtatacagtgtgaatccagatcaggtcgctcaagtgacatctggcggcagcagcggcggctcaagcggaagtgaaacacctggaacttccgaaagcgctacgcctgaatcttctggtggatcttctggcggatcttccgcatgcatgtcaacggacatgaagaactatcgtatcggggtcgacgtgggtgatcgaagcgtaggcctcgcagcgattgaatttgacgatgacggactgcctatacagaaactcgcattagtcaccttccgtcacgatggtggtctggatcctactaagaacaagacccctatgagtcgcaaggagacgcggggaatagccaggagaaccatgcgaatgaacagagagcggaaaagacggctccgtaacctggacaatgttttagaaaacttgggctactcagtcccggaaggaccagaacctgagacatatgaagcctggacctctcgggctcttctggcatccattaagctcgcaagtgccgatgagctgaatgaacatttggttagagcggtcagacatatggctcgacacaggggatgggccaatccgtggtggtctttagatcagctcgaaaaggctagtcaggagccaagcgagacattcgagatcatcctggcacgcgctagggagctgttcggagaaaaggtgcccgctaaccctacattaggtatgctgggcgccttagcggctaacaatgaggtactgcttcgacccagggacgagaagaaacgaaagaccggctacgtgagaggtacacccttaatgttcgcgcaggtcaggcagggagatcagctcgcggagctccgtcgaatctgcgaagttcaagggatcgaagatcaatatgaagctctgagattaggggtgttcgatcacaagcacccttacgtccctaaggaacgcgtcggaaaagacccactgaatccgagcacgaaccggaccatccgggctagtttggagttccaggaatttagaatattagattccgttgctaacctgagggtgagaatcggctcccgagctaaacgggagcttaccgaggcagagtacgacgcggccgtcgaatttcttatggattacgccgacaaggagcagccttcctgggctgacgttgcagagaaaatcggcgtacctggtaacaggctggtggcacccgtgttagaggacgtgcagcagaaaactgctccctatgataggtcttccgcggcatttgaaaaggcaatgggaaagaagaccgaagccagacagtggtgggaaagcactgatgatgaccaactgcggagtctcctgattgctttcctggtcgacgccaccaatgataccgaggaagcagcggcagaagccggacttagtgagttatataaatcatggcccgccgaggagagggaagcactctctaatatcgacttcgaaaagggaagagtggcctactcacaggaaaccttgagcaagttgtccgaatacatgcacgaataccgagttggcttgcatgaggccagaaaggctgtctttggggtcgacgatacatggcgcccaccacttgataaactggaagagcctacaggacagcctgctgtcgaccgcgttcttacaatactcaggcggttcgtgctggactgcgagcgccagtggggtcggcccagagccatcaccgtcgagcatacaaggactggattgatgggaccaacgcagcggcagaaaattcttaacgaacagaagaagaatcgggctgacaatgagcgtatccgcgacgaacttcgggaaagcggggtagataacccatcacgggcggaagttcggcgtcatttgatagtgcaagaacaggagtgccagtgtctgtattgtgggacaatgatcaccactaccactagtgaactggacgccatagtgccgcgggccggtggcggctcaagtaggcgtgagaacttggccgccgtctgtcgcgcttgtaatgccaagaagaaaagggagttattttatgcatgggccgggccggtgaagtcccaggagactatcgagagggtgagacagcttaaagccttcaaagactccaagaaagccaagatgtttaagaatcagatccgacgattaaatcagaccgaagcagatgaaccgatagacgagcgttctcttgcatccacttcatacgccgcagtcgctgtcagggagcggttagaacaacattttaacgagggtctggcacttgatgataaatcccgagtggtactggacgtgtatgccggcgctgtgacaagagagagtcgccgggcgggcgggatcgacgagcggattttattaaggggcgaacgggataagaaccgattcgacgttaggcaccatgcagtcgacgctgcagtgatgacactgcttaataggtccgtggcactgaccctggagcaacgtagccagctgcggcgcacattctatgaacagggactggacaagctggaccgcaatcaacttaagcctgaagaggactggagagatttcaccggcctggcccctgcatcccaggagaaattcttggagtggcggaaagctgccacaattctcggagacttgctggctgaggcaatagaagatgacagcattgcggttgtatcaccactccgccttagaccccagaacggatctgtgcaccttgaaaccatatccgctgtgaagaagcagacactcggttccgattggccagccgatgccgttaagagaatcgtggaccctgaaatttatcttgccatgaaagacgctctgggcaagctgaaggagctcccagaagactctgcacgaagcctggaactgccagatgggcgcttcgttgaagccgacgacgaagtcttgttcttccccgagaacgccgcatctattctgacacctcgcggggttgctgagattggtgggtcaatacaccacgcacggctctacggctggctgaccaagaagggagaactgaaggtagggatgcttagagtctacggggccgagttcccttggctgatgagggaaagtgggagccgaaacgttctgtccatgccaattcaccggggcagtcagtctttcagagatatgcaagatacaactaggaaggcggtggagagcggcgaagccgtcgagttcgcatggatcacacagaatgacgagctcgaatttgacccggatgactatatcgcccacggcggtaaggacgaactgcggcagttcctcgggttcatgccagagtgccggtggagagtcgatggctttaagaagaattatcagatcagaatcagaccagccatgctgtcacgagaacagctgccatccgatatacagaggcggctggagtctaaaacactgaccaagaatgaaagcttgctgctcaaggctcttgacacgggactcgtggttgcgatcggcggacttctcccattagaaaccttgaaggtgatacggcgaaacaatcttggatttcccagatggcgcggcaatggaaatcttccgacatcttttgaggtacgcagctccgctctccgagccctgggagtagaaggtcctaggggcggcggaggcagctacccctatgatgtacctgattatgcttctggcggacccaagaagaagaggaaagtcggtggttctcctaagaaaaagagaaaggtcggatccggcgccaccaattttagccttttaaagcaggctggcgacgttgaggaaaacccggggcccatggaccaagccaaacccctgagccaagaggagtctacactgatcgagcgggccaccgcaaccattaatagtattccaattagtgaggattattctgtggcatccgccgcattatccagtgatgggcgtattttcaccggcgttaacgtgtaccacttcaccggcggcccctgcgcagagctggtcgttttgggtacagcagcagcagcagccgccgggaatctcacctgcattgtggcaataggcaacgaaaatcggggaattttatcaccgtgtggtcgttgtcgccaagttctgcttgacctgcaccccggcattaaggcaatcgttaaagattccgacggccaacccacagctgtcggcatacgagagttacttccaagcggatacgtttgggaaggatag

SEQ ID NO: 704 - DNA, 5952 bp, synthetic construct
  source 1..5952: mol_type = other DNA; note = MG151-99_cloned_into_tethered_MG3-6(H586A)plasmid
atgcctaagaagaaacgaaaggttcgtgccgtgcaggcaattattcgaggacatgccgagatagagcctatatgcctgcctcagccgcgcaggattaccaacacgaagcagtatcggctgcctgggggacagcaggagataacaaagactgtgcaagagctggagcgcgtcggaattattagacccgctcatagtccatataacagcccaatttggcccgtacgtaagcctgatggaacttggcggatgactgttgactatcgcgaactcaataaagtgactccaccaattcacgcagccgtgcctaatatcgcaagcctcatggatacactgagccgagaaatcgagacttatcactgtgtgctggacctggcaaatgcctttttctccatcccgatcgccaaggagtctcaagaccagtttgcctttacctgggaaggaagacagtggaccttccaggtccttccacagggctacgttcacagtccgacattttgccacaacttggtcgcctccgatttggctaactggaataagcccagtacagttaagatgtttcattacatagacgaccttatgcttacaagcgattccatcgaggctcttgagaagacagttccctcactgatcacttacttgcaggaaaaagggtgggcaattaatccccagaaggtccaaggacccggtctgagcgttaagttcctgggtgttgtgtggagtggcaagacaaaagtgctccccagcgccatcatcgacaaaattcaggcattccccgtcccaacgaagccaaaacagctccaggagtttctgggtatcctcggctattggaggtcttttattccccacctcgcacagcttcttaaacccttgtatcggctcactaagaaaggccaggtgtgggattggggacgcacagagcaagaggccttccagcaagccaagattgctgtgaagcaagctcaggcacttgggatctttgaccccacactcccagccgagctggatgtgcatgtaacacaggagggcttcgggtggggcctctggcagcggcaaggttccgtgcgaatccctatcggcttctggtctcaaatctggcatggggccgaggagcgctactccatggtcgaaaagcagctgctcgccacatactcagccctccaggctgtggagcccattacacagactgctgaagtaattgttaaaactacacttcctatccagggttgggtgaaagacttgacacacattcctaagaccggcgttgctcagagccaaaccgtggcaaggtgggtagcatatctctctcaacgttcccgcctcagttccagccctctgaaggaagagctccagaagattttgggacctgtaacataccatagcgagactccagaggagatcgtcgtgacctgcccagaaaagtcacctgttcaggaaggcaaataccccattcctgaggatgcttggtacactgacggaagttctcgggggaatcccagcagatggagggcagtggcttatcacccatccactgagacaatttggtttgaagaaggggacggacagtcatctcagtgggccgagctgcgagccgtatggatggtgatcacacaggagccagggaactctgctcttaacatttgtactgactcatgggcagtttacagggggctgaccctctggatcgcacagtgggctacacaggattggactatccatgcaaggcctatttggggtaaggacatgtgggtggacatctggaacgtagtccgccataggacggtgagggcttatcacgtgagcggacaccaacctctgcagagccctggcaatgatgaggccgacaccctggccagggtcaggtggctgtctggcggcagcagcggcggctcaagcggaagtgaaacacctggaacttccgaaagcgctacgcctgaatcttctggtggatcttctggcggatcttccgcatgcatgtcaacggacatgaagaactatcgtatcggggtcgacgtgggtgatcgaagcgtaggcctcgcagcgattgaatttgacgatgacggactgcctatacagaaactcgcattagtcaccttccgtcacgatggtggtctggatcctactaagaacaagacccctatgagtcgcaaggagacgcggggaatagccaggagaaccatgcgaatgaacagagagcggaaaagacggctccgtaacctggacaatgttttagaaaacttgggctactcagtcccggaaggaccagaacctgagacatatgaagcctggacctctcgggctcttctggcatccattaagctcgcaagtgccgatgagctgaatgaacatttggttagagcggtcagacatatggctcgacacaggggatgggccaatccgtggtggtctttagatcagctcgaaaaggctagtcaggagccaagcgagacattcgagatcatcctggcacgcgctagggagctgttcggagaaaaggtgcccgctaaccctacattaggtatgctgggcgccttagcggctaacaatgaggtactgcttcgacccagggacgagaagaaacgaaagaccggctacgtgagaggtacacccttaatgttcgcgcaggtcaggcagggagatcagctcgcggagctccgtcgaatctgcgaagttcaagggatcgaagatcaatatgaagctctgagattaggggtgttcgatcacaagcacccttacgtccctaaggaacgcgtcggaaaagacccactgaatccgagcacgaaccggaccatccgggctagtttggagttccaggaatttagaatattagattccgttgctaacctgagggtgagaatcggctcccgagctaaacgggagcttaccgaggcagagtacgacgcggccgtcgaatttcttatggattacgccgacaaggagcagccttcctgggctgacgttgcagagaaaatcggcgtacctggtaacaggctggtggcacccgtgttagaggacgtgcagcagaaaactgctccctatgataggtcttccgcggcatttgaaaaggcaatgggaaagaagaccgaagccagacagtggtgggaaagcactgatgatgaccaactgcggagtctcctgattgctttcctggtcgacgccaccaatgataccgaggaagcagcggcagaagccggacttagtgagttatataaatcatggcccgccgaggagagggaagcactctctaatatcgacttcgaaaagggaagagtggcctactcacaggaaaccttgagcaagttgtccgaatacatgcacgaataccgagttggcttgcatgaggccagaaaggctgtctttggggtcgacgatacatggcgcccaccacttgataaactggaagagcctacaggacagcctgctgtcgaccgcgttcttacaatactcaggcggttcgtgctggactgcgagcgccagtggggtcggcccagagccatcaccgtcgagcatacaaggactggattgatgggaccaacgcagcggcagaaaattcttaacgaacagaagaagaatcgggctgacaatgagcgtatccgcgacgaacttcgggaaagcggggtagataacccatcacgggcggaagttcggcgtcatttgatagtgcaagaacaggagtgccagtgtctgtattgtgggacaatgatcaccactaccactagtgaactggacgccatagtgccgcgggccggtggcggctcaagtaggcgtgagaacttggccgccgtctgtcgcgcttgtaatgccaagaagaaaagggagttattttatgcatgggccgggccggtgaagtcccaggagactatcgagagggtgagacagcttaaagccttcaaagactccaagaaagccaagatgtttaagaatcagatccgacgattaaatcagaccgaagcagatgaaccgatagacgagcgttctcttgcatccacttcatacgccgcagtcgctgtcagggagcggttagaacaacattttaacgagggtctggcacttgatgataaatcccgagtggtactggacgtgtatgccggcgctgtgacaagagagagtcgccgggcgggcgggatcgacgagcggattttattaaggggcgaacgggataagaaccgattcgacgttaggcaccatgcagtcgacgctgcagtgatgacactgcttaataggtccgtggcactgaccctggagcaacgtagccagctgcggcgcacattctatgaacagggactggacaagctggaccgcaatcaacttaagcctgaagaggactggagagatttcaccggcctggcccctgcatcccaggagaaattcttggagtggcggaaagctgccacaattctcggagacttgctggctgaggcaatagaagatgacagcattgcggttgtatcaccactccgccttagaccccagaacggatctgtgcaccttgaaaccatatccgctgtgaagaagcagacactcggttccgattggccagccgatgccgttaagagaatcgtggaccctgaaatttatcttgccatgaaagacgctctgggcaagctgaaggagctcccagaagactctgcacgaagcctggaactgccagatgggcgcttcgttgaagccgacgacgaagtcttgttcttccccgagaacgccgcatctattctgacacctcgcggggttgctgagattggtgggtcaatacaccacgcacggctctacggctggctgaccaagaagggagaactgaaggtagggatgcttagagtctacggggccgagttcccttggctgatgagggaaagtgggagccgaaacgttctgtccatgccaattcaccggggcagtcagtctttcagagatatgcaagatacaactaggaaggcggtggagagcggcgaagccgtcgagttcgcatggatcacacagaatgacgagctcgaatttgacccggatgactatatcgcccacggcggtaaggacgaactgcggcagttcctcgggttcatgccagagtgccggtggagagtcgatggctttaagaagaattatcagatcagaatcagaccagccatgctgtcacgagaacagctgccatccgatatacagaggcggctggagtctaaaacactgaccaagaatgaaagcttgctgctcaaggctcttgacacgggactcgtggttgcgatcggcggacttctcccattagaaaccttgaaggtgatacggcgaaacaatcttggatttcccagatggcgcggcaatggaaatcttccgacatcttttgaggtacgcagctccgctctccgagccctgggagtagaaggtcctaggggcggcggaggcagctacccctatgatgtacctgattatgcttctggcggacccaagaagaagaggaaagtcggtggttctcctaagaaaaagagaaaggtcggatccggcgccaccaattttagccttttaaagcaggctggcgacgttgaggaaaacccggggcccatggaccaagccaaacccctgagccaagaggagtctacactgatcgagcgggccaccgcaaccattaatagtattccaattagtgaggattattctgtggcatccgccgcattatccagtgatgggcgtattttcaccggcgttaacgtgtaccacttcaccggcggcccctgcgcagagctggtcgttttgggtacagcagcagcagcagccgccgggaatctcacctgcattgtggcaataggcaacgaaaatcggggaattttatcaccgtgtggtcgttgtcgccaagttctgcttgacctgcaccccggcattaaggcaatcgttaaagattccgacggccaacccacagctgtcggcatacgagagttacttccaagcggatacgtttgggaaggatag

SEQ ID NO: 705 - DNA, 5277 bp, synthetic construct
  source 1..5277: mol_type = other DNA; note = MG153-53_cloned_into_tethered_MG3-6(H586A)plasmid
atgcctaagaagaaacgaaaggttgcatgcgtcgacaagaagagaaaatggtacagtctggttgacaagatctggaaattcagtaacctcgaagcagctttcagcaaagtaaaagagaaccggggagccgcagggatcgacagagtgagcatcggccagttcgagaggcagaagcaacagaatcttttggagatccaaagacttctgaggagcaaacgctacgaggcaattccagtcagacgcgttgaaatacctaagagcgacggacggtatagacctctgggcattcctacggtcagagatcgcgtggtgcagcaggctacctttgctgttatgtcccctatttttgagacaaagtttctggactgttcttacgggtttaggaagggacgaaatacgcaccaggccattgccaaaatggaacaatacaggaatgagggctgcgagtgggtggtggaagctgatatagagtcattttttgacaccgttaatcacgagttgcttattgatcaggttgctgaggaaatctcagatggttcagtgcttaagcttattaggtcctggctgactgccggcgcatttaaaggaacagaagtgattgagacttctgtgggaacaccacaagggggtgtcatttccccgcttctcgcaaatatatatctgcacccattcgatgtacagatgacagccctgggcttcaagctggtgaggtatgccgatgatttcgtcataatgtgcagaagcgaggacgaggcagaacgggccatggaagccgctacccggatcctctctgggattaaactccgggtaaaggccgctaaaacccgaatagtgcagctgagtaaggacgacggaatcgaatttctcggtttcaccatcttcaaggaacataaggtcccccgaactagagctgtcgagaatttcaaatcacgcattcgcctgatcactcgaagacagaggcccgctacccttcaggagatcatcaaggaactgaatcccgtggtgcggggttggggaaactatttcaaaattgccaacgtaaactggctctacaaaggcttggattcttggatgcgaatgcgccttcggtcttttctcgagaagaagaagagctatgaagccaacaaaaggctggaaaacaaacattttagtgaagcaggcttgactacactgtcctccttgatcgggtactctggcggcagcagcggcggctcaagcggaagtgaaacacctggaacttccgaaagcgctacgcctgaatcttctggtggatcttctggcggatcttccgcatgcatgtcaacggacatgaagaactatcgtatcggggtcgacgtgggtgatcgaagcgtaggcctcgcagcgattgaatttgacgatgacggactgcctatacagaaactcgcattagtcaccttccgtcacgatggtggtctggatcctactaagaacaagacccctatgagtcgcaaggagacgcggggaatagccaggagaaccatgcgaatgaacagagagcggaaaagacggctccgtaacctggacaatgttttagaaaacttgggctactcagtcccggaaggaccagaacctgagacatatgaagcctggacctctcgggctcttctggcatccattaagctcgcaagtgccgatgagctgaatgaacatttggttagagcggtcagacatatggctcgacacaggggatgggccaatccgtggtggtctttagatcagctcgaaaaggctagtcaggagccaagcgagacattcgagatcatcctggcacgcgctagggagctgttcggagaaaaggtgcccgctaaccctacattaggtatgctgggcgccttagcggctaacaatgaggtactgcttcgacccagggacgagaagaaacgaaagaccggctacgtgagaggtacacccttaatgttcgcgcaggtcaggcagggagatcagctcgcggagctccgtcgaatctgcgaagttcaagggatcgaagatcaatatgaagctctgagattaggggtgttcgatcacaagcacccttacgtccctaaggaacgcgtcggaaaagacccactgaatccgagcacgaaccggaccatccgggctagtttggagttccaggaatttagaatattagattccgttgctaacctgagggtgagaatcggctcccgagctaaacgggagcttaccgaggcagagtacgacgcggccgtcgaatttcttatggattacgccgacaaggagcagccttcctgggctgacgttgcagagaaaatcggcgtacctggtaacaggctggtggcacccgtgttagaggacgtgcagcagaaaactgctccctatgataggtcttccgcggcatttgaaaaggcaatgggaaagaagaccgaagccagacagtggtgggaaagcactgatgatgaccaactgcggagtctcctgattgctttcctggtcgacgccaccaatgataccgaggaagcagcggcagaagccggacttagtgagttatataaatcatggcccgccgaggagagggaagcactctctaatatcgacttcgaaaagggaagagtggcctactcacaggaaaccttgagcaagttgtccgaatacatgcacgaataccgagttggcttgcatgaggccagaaaggctgtctttggggtcgacgatacatggcgcccaccacttgataaactggaagagcctacaggacagcctgctgtcgaccgcgttcttacaatactcaggcggttcgtgctggactgcgagcgccagtggggtcggcccagagccatcaccgtcgagcatacaaggactggattgatgggaccaacgcagcggcagaaaattcttaacgaacagaagaagaatcgggctgacaatgagcgtatccgcgacgaacttcgggaaagcggggtagataacccatcacgggcggaagttcggcgtcatttgatagtgcaagaacaggagtgccagtgtctgtattgtgggacaatgatcaccactaccactagtgaactggacgccatagtgccgcgggccggtggcggctcaagtaggcgtgagaacttggccgccgtctgtcgcgcttgtaatgccaagaagaaaagggagttattttatgcatgggccgggccggtgaagtcccaggagactatcgagagggtgagacagcttaaagccttcaaagactccaagaaagccaagatgtttaagaatcagatccgacgattaaatcagaccgaagcagatgaaccgatagacgagcgttctcttgcatccacttcatacgccgcagtcgctgtcagggagcggttagaacaacattttaacgagggtctggcacttgatgataaatcccgagtggtactggacgtgtatgccggcgctgtgacaagagagagtcgccgggcgggcgggatcgacgagcggattttattaaggggcgaacgggataagaaccgattcgacgttaggcaccatgcagtcgacgctgcagtgatgacactgcttaataggtccgtggcactgaccctggagcaacgtagccagctgcggcgcacattctatgaacagggactggacaagctggaccgcaatcaacttaagcctgaagaggactggagagatttcaccggcctggcccctgcatcccaggagaaattcttggagtggcggaaagctgccacaattctcggagacttgctggctgaggcaatagaagatgacagcattgcggttgtatcaccactccgccttagaccccagaacggatctgtgcaccttgaaaccatatccgctgtgaagaagcagacactcggttccgattggccagccgatgccgttaagagaatcgtggaccctgaaatttatcttgccatgaaagacgctctgggcaagctgaaggagctcccagaagactctgcacgaagcctggaactgccagatgggcgcttcgttgaagccgacgacgaagtcttgttcttccccgagaacgccgcatctattctgacacctcgcggggttgctgagattggtgggtcaatacaccacgcacggctctacggctggctgaccaagaagggagaactgaaggtagggatgcttagagtctacggggccgagttcccttggctgatgagggaaagtgggagccgaaacgttctgtccatgccaattcaccggggcagtcagtctttcagagatatgcaagatacaactaggaaggcggtggagagcggcgaagccgtcgagttcgcatggatcacacagaatgacgagctcgaatttgacccggatgactatatcgcccacggcggtaaggacgaactgcggcagttcctcgggttcatgccagagtgccggtggagagtcgatggctttaagaagaattatcagatcagaatcagaccagccatgctgtcacgagaacagctgccatccgatatacagaggcggctggagtctaaaacactgaccaagaatgaaagcttgctgctcaaggctcttgacacgggactcgtggttgcgatcggcggacttctcccattagaaaccttgaaggtgatacggcgaaacaatcttggatttcccagatggcgcggcaatggaaatcttccgacatcttttgaggtacgcagctccgctctccgagccctgggagtagaaggtcctaggggcggcggaggcagctacccctatgatgtacctgattatgcttctggcggacccaagaagaagaggaaagtcggtggttctcctaagaaaaagagaaaggtcggatccggcgccaccaattttagccttttaaagcaggctggcgacgttgaggaaaacccggggcccatggaccaagccaaacccctgagccaagaggagtctacactgatcgagcgggccaccgcaaccattaatagtattccaattagtgaggattattctgtggcatccgccgcattatccagtgatgggcgtattttcaccggcgttaacgtgtaccacttcaccggcggcccctgcgcagagctggtcgttttgggtacagcagcagcagcagccgccgggaatctcacctgcattgtggcaataggcaacgaaaatcggggaattttatcaccgtgtggtcgttgtcgccaagttctgcttgacctgcaccccggcattaaggcaatcgttaaagattccgacggccaacccacagctgtcggcatacgagagttacttccaagcggatacgtttgggaaggatag

SEQ ID NO: 706 - DNA, 6199 bp, synthetic construct
  source 1..6199: mol_type = other DNA; note = MMLV1_cloned_into_tethered_MG3-6(H586A)plasmid
atgcctaagaagaaacgaaaggttatgtcaacggacatgaagaactatcgtatcggggtcgacgtgggtgatcgaagcgtaggcctcgcagcgattgaatttgacgatgacggactgcctatacagaaactcgcattagtcaccttccgtcacgatggtggtctggatcctactaagaacaagacccctatgagtcgcaaggagacgcggggaatagccaggagaaccatgcgaatgaacagagagcggaaaagacggctccgtaacctggacaatgttttagaaaacttgggctactcagtcccggaaggaccagaacctgagacatatgaagcctggacctctcgggctcttctggcatccattaagctcgcaagtgccgatgagctgaatgaacatttggttagagcggtcagacatatggctcgacacaggggatgggccaatccgtggtggtctttagatcagctcgaaaaggctagtcaggagccaagcgagacattcgagatcatcctggcacgcgctagggagctgttcggagaaaaggtgcccgctaaccctacattaggtatgctgggcgccttagcggctaacaatgaggtactgcttcgacccagggacgagaagaaacgaaagaccggctacgtgagaggtacacccttaatgttcgcgcaggtcaggcagggagatcagctcgcggagctccgtcgaatctgcgaagttcaagggatcgaagatcaatatgaagctctgagattaggggtgttcgatcacaagcacccttacgtccctaaggaacgcgtcggaaaagacccactgaatccgagcacgaaccggaccatccgggctagtttggagttccaggaatttagaatattagattccgttgctaacctgagggtgagaatcggctcccgagctaaacgggagcttaccgaggcagagtacgacgcggccgtcgaatttcttatggattacgccgacaaggagcagccttcctgggctgacgttgcagagaaaatcggcgtacctggtaacaggctggtggcacccgtgttagaggacgtgcagcagaaaactgctccctatgataggtcttccgcggcatttgaaaaggcaatgggaaagaagaccgaagccagacagtggtgggaaagcactgatgatgaccaactgcggagtctcctgattgctttcctggtcgacgccaccaatgataccgaggaagcagcggcagaagccggacttagtgagttatataaatcatggcccgccgaggagagggaagcactctctaatatcgacttcgaaaagggaagagtggcctactcacaggaaaccttgagcaagttgtccgaatacatgcacgaataccgagttggcttgcatgaggccagaaaggctgtctttggggtcgacgatacatggcgcccaccacttgataaactggaagagcctacaggacagcctgctgtcgaccgcgttcttacaatactcaggcggttcgtgctggactgcgagcgccagtggggtcggcccagagccatcaccgtcgagcatacaaggactggattgatgggaccaacgcagcggcagaaaattcttaacgaacagaagaagaatcgggctgacaatgagcgtatccgcgacgaacttcgggaaagcggggtagataacccatcacgggcggaagttcggcgtcatttgatagtgcaagaacaggagtgccagtgtctgtattgtgggacaatgatcaccactaccactagtgaactggacgccatagtgccgcgggccggtggcggctcaagtaggcgtgagaacttggccgccgtctgtcgcgcttgtaatgccaagaagaaaagggagttattttatgcatgggccgggccggtgaagtcccaggagactatcgagagggtgagacagcttaaagccttcaaagactccaagaaagccaagatgtttaagaatcagatccgacgattaaatcagaccgaagcagatgaaccgatagacgagcgttctcttgcatccacttcatacgccgcagtcgctgtcagggagcggttagaacaacattttaacgagggtctggcacttgatgataaatcccgagtggtactggacgtgtatgccggcgctgtgacaagagagagtcgccgggcgggcgggatcgacgagcggattttattaaggggcgaacgggataagaaccgattcgacgttaggcaccatgcagtcgacgctgcagtgatgacactgcttaataggtccgtggcactgaccctggagcaacgtagccagctgcggcgcacattctatgaacagggactggacaagctggaccgcaatcaacttaagcctgaagaggactggagagatttcaccggcctggcccctgcatcccaggagaaattcttggagtggcggaaagctgccacaattctcggagacttgctggctgaggcaatagaagatgacagcattgcggttgtatcaccactccgccttagaccccagaacggatctgtgcaccttgaaaccatatccgctgtgaagaagcagacactcggttccgattggccagccgatgccgttaagagaatcgtggaccctgaaatttatcttgccatgaaagacgctctgggcaagctgaaggagctcccagaagactctgcacgaagcctggaactgccagatgggcgcttcgttgaagccgacgacgaagtcttgttcttccccgagaacgccgcatctattctgacacctcgcggggttgctgagattggtgggtcaatacaccacgcacggctctacggctggctgaccaagaagggagaactgaaggtagggatgcttagagtctacggggccgagttcccttggctgatgagggaaagtgggagccgaaacgttctgtccatgccaattcaccggggcagtcagtctttcagagatatgcaagatacaactaggaaggcggtggagagcggcgaagccgtcgagttcgcatggatcacacagaatgacgagctcgaatttgacccggatgactatatcgcccacggcggtaaggacgaactgcggcagttcctcgggttcatgccagagtgccggtggagagtcgatggctttaagaagaattatcagatcagaatcagaccagccatgctgtcacgagaacagctgccatccgatatacagaggcggctggagtctaaaacactgaccaagaatgaaagcttgctgctcaaggctcttgacacgggactcgtggttgcgatcggcggacttctcccattagaaaccttgaaggtgatacggcgaaacaatcttggatttcccagatggcgcggcaatggaaatcttccgacatcttttgaggtacgcagctccgctctccgagccctgggagtagaaggttctggcggcagcagcggcggctcaagcggaagtgaaacacctggaacttccgaaagcgctacgcctgaatcttctggtggatcttctggcggatcttccgcatgcactctgaacatcgaggacgaatacaggctccacgaaacttctaaggaacctgacgtgtccttgggatcaacttggttgtccgacttcccccaagcttgggccgagacaggcggaatgggtttggccgtgagacaggccccactcataatcccacttaaggcgacatccactccggtcagtatcaagcagtatccaatgtcccaggaagcacgcttaggaattaaaccacatattcaacgactcctggatcaaggtattctcgtcccatgtcaaagcccttggaatacccctcttctgcctgtgaagaagcccggcacaaacgactaccggcccgtgcaagacctcagggaagtgaataaacgagtcgaggatatacatccgactgtcccgaatccctataatctgctgtcaggtctgccaccaagtcatcaatggtatacagtactggacctgaaagacgcgttcttttgtttgcgactgcatcctacgtctcaaccgctgtttgcattcgaatggcgggaccccgaaatggggatttctgggcagctgacatggactcgtcttcctcaagggtttaagaactcccctacacttttcgacgaagccctgcatcgggatttagctgattttagaatccaacatcctgatctgattctcctgcaatatgttgacgatctgctcctcgctgcaaccagtgaacttgattgtcagcagggaacgagagctttactccagactctgggcaatcttggttaccgtgcttcagctaagaaggctcagatatgtcaaaagcaagtgaaataccttggttacctgttgaaggaagggcaacgctggttaaccgaagctcgcaaggaaacagtaatgggccaacccacacccaaaacaccccgccagctgagagaatttctcggtacagctggattttgcagactgtggattcccggtttcgccgagatggccgcacctctttatccactgacgaagactggtaccctcttcaactggggacccgatcagcagaaagcttaccaggagattaaacaggcactgctgaccgctcccgcgctcggcctgcccgacctgacgaaaccattcgagcttttcgtggatgagaaacaaggatatgctaagggagtgctgactcagaagcttgggccgtggcgacgcccagtagcttatctcagcaagaaactggatcctgtggccgccggttggccgccatgtttgagaatggttgccgctatcgcagtcctcaccaaagacgccggtaaactgacaatggggcaacctctggtgatcctcgctccgcacgctgtggaagccttagtgaagcagccacctgataggtggttaagcaatgcgagaatgacccattaccaagcgttattgctggataccgatagagtgcaatttggccccgttgtcgctctcaatcccgcgactcttctgcccttaccagaagagggacttcagcataattgtttggacattctcgcagaggctcatggcactcggccagatctcaccgatcaaccccttcctgatgctgatcatacttggtatactgacggctcatccctgctgcaggaaggccaaagaaaagccggcgccgctgtcacaacagaaactgaagtgatttgggccaaggcactccctgcaggaactagcgcccaaagagccgagctcatcgcccttactcaagctctcaaaatggccgagggcaagaaacttaacgtgtacacagactccaggtacgccttcgccacagcacacattcacggcgagatctatcgccgaaggggacttctgacgagtgagggaaaggaaattaagaacaaggatgaaatactggcgctgctgaaggctctgtttctccctaagcggctgtccattattcactgccctggtcaccagaaagggcattccgctgaagccaggggcaataggatggcagatcaggctgcaaggaaagctgcaattaccgaaacgcccgatacgagcacacttcttatcgagaactcttccccttcaggcggtagcaagcggacagcagatggatccgagtttgaacctaggggcggcggaggcagctacccctatgatgtacctgattatgcttctggcggacccaagaagaagaggaaagtcggtggttctcctaagaaaaagagaaaggtcggatccggcgccaccaattttagccttttaaagcaggctggcgacgttgaggaaaacccggggcccatggaccaagccaaacccctgagccaagaggagtctacactgatcgagcgggccaccgcaaccattaatagtattccaattagtgaggattattctgtggcatccgccgcattatccagtgatgggcgtattttcaccggcgttaacgtgtaccacttcaccggcggcccctgcgcagagctggtcgttttgggtacagcagcagcagcagccgccgggaatctcacctgcattgtggcaataggcaacgaaaatcggggaattttatcaccgtgtggtcgttgtcgccaagttctgcttgacctgcaccccggcattaaggcaatcgttaaagattccgacggccaacccacagctgtcggcatacgagagttacttccaagcggatacgtttgggaaggatagggatccgcaggcctct

SEQ ID NO: 707 - DNA, 6183 bp, synthetic construct
  source 1..6183: mol_type = other DNA; note = MMLV1_cloned_into_tethered_MG3-6(H586A)plasmid
atgcctaagaagaaacgaaaggttactctgaacatcgaggacgaatacaggctccacgaaacttctaaggaacctgacgtgtccttgggatcaacttggttgtccgacttcccccaagcttgggccgagacaggcggaatgggtttggccgtgagacaggccccactcataatcccacttaaggcgacatccactccggtcagtatcaagcagtatccaatgtcccaggaagcacgcttaggaattaaaccacatattcaacgactcctggatcaaggtattctcgtcccatgtcaaagcccttggaatacccctcttctgcctgtgaagaagcccggcacaaacgactaccggcccgtgcaagacctcagggaagtgaataaacgagtcgaggatatacatccgactgtcccgaatccctataatctgctgtcaggtctgccaccaagtcatcaatggtatacagtactggacctgaaagacgcgttcttttgtttgcgactgcatcctacgtctcaaccgctgtttgcattcgaatggcgggaccccgaaatggggatttctgggcagctgacatggactcgtcttcctcaagggtttaagaactcccctacacttttcgacgaagccctgcatcgggatttagctgattttagaatccaacatcctgatctgattctcctgcaatatgttgacgatctgctcctcgctgcaaccagtgaacttgattgtcagcagggaacgagagctttactccagactctgggcaatcttggttaccgtgcttcagctaagaaggctcagatatgtcaaaagcaagtgaaataccttggttacctgttgaaggaagggcaacgctggttaaccgaagctcgcaaggaaacagtaatgggccaacccacacccaaaacaccccgccagctgagagaatttctcggtacagctggattttgcagactgtggattcccggtttcgccgagatggccgcacctctttatccactgacgaagactggtaccctcttcaactggggacccgatcagcagaaagcttaccaggagattaaacaggcactgctgaccgctcccgcgctcggcctgcccgacctgacgaaaccattcgagcttttcgtggatgagaaacaaggatatgctaagggagtgctgactcagaagcttgggccgtggcgacgcccagtagcttatctcagcaagaaactggatcctgtggccgccggttggccgccatgtttgagaatggttgccgctatcgcagtcctcaccaaagacgccggtaaactgacaatggggcaacctctggtgatcctcgctccgcacgctgtggaagccttagtgaagcagccacctgataggtggttaagcaatgcgagaatgacccattaccaagcgttattgctggataccgatagagtgcaatttggccccgttgtcgctctcaatcccgcgactcttctgcccttaccagaagagggacttcagcataattgtttggacattctcgcagaggctcatggcactcggccagatctcaccgatcaaccccttcctgatgctgatcatacttggtatactgacggctcatccctgctgcaggaaggccaaagaaaagccggcgccgctgtcacaacagaaactgaagtgatttgggccaaggcactccctgcaggaactagcgcccaaagagccgagctcatcgcccttactcaagctctcaaaatggccgagggcaagaaacttaacgtgtacacagactccaggtacgccttcgccacagcacacattcacggcgagatctatcgccgaaggggacttctgacgagtgagggaaaggaaattaagaacaaggatgaaatactggcgctgctgaaggctctgtttctccctaagcggctgtccattattcactgccctggtcaccagaaagggcattccgctgaagccaggggcaataggatggcagatcaggctgcaaggaaagctgcaattaccgaaacgcccgatacgagcacacttcttatcgagaactcttccccttcaggcggtagcaagcggacagcagatggatccgagtttgaatctggcggcagcagcggcggctcaagcggaagtgaaacacctggaacttccgaaagcgctacgcctgaatcttctggtggatcttctggcggatcttccgcatgcatgtcaacggacatgaagaactatcgtatcggggtcgacgtgggtgatcgaagcgtaggcctcgcagcgattgaatttgacgatgacggactgcctatacagaaactcgcattagtcaccttccgtcacgatggtggtctggatcctactaagaacaagacccctatgagtcgcaaggagacgcggggaatagccaggagaaccatgcgaatgaacagagagcggaaaagacggctccgtaacctggacaatgttttagaaaacttgggctactcagtcccggaaggaccagaacctgagacatatgaagcctggacctctcgggctcttctggcatccattaagctcgcaagtgccgatgagctgaatgaacatttggttagagcggtcagacatatggctcgacacaggggatgggccaatccgtggtggtctttagatcagctcgaaaaggctagtcaggagccaagcgagacattcgagatcatcctggcacgcgctagggagctgttcggagaaaaggtgcccgctaaccctacattaggtatgctgggcgccttagcggctaacaatgaggtactgcttcgacccagggacgagaagaaacgaaagaccggctacgtgagaggtacacccttaatgttcgcgcaggtcaggcagggagatcagctcgcggagctccgtcgaatctgcgaagttcaagggatcgaagatcaatatgaagctctgagattaggggtgttcgatcacaagcacccttacgtccctaaggaacgcgtcggaaaagacccactgaatccgagcacgaaccggaccatccgggctagtttggagttccaggaatttagaatattagattccgttgctaacctgagggtgagaatcggctcccgagctaaacgggagcttaccgaggcagagtacgacgcggccgtcgaatttcttatggattacgccgacaaggagcagccttcctgggctgacgttgcagagaaaatcggcgtacctggtaacaggctggtggcacccgtgttagaggacgtgcagcagaaaactgctccctatgataggtcttccgcggcatttgaaaaggcaatgggaaagaagaccgaagccagacagtggtgggaaagcactgatgatgaccaactgcggagtctcctgattgctttcctggtcgacgccaccaatgataccgaggaagcagcggcagaagccggacttagtgagttatataaatcatggcccgccgaggagagggaagcactctctaatatcgacttcgaaaagggaagagtggcctactcacaggaaaccttgagcaagttgtccgaatacatgcacgaataccgagttggcttgcatgaggccagaaaggctgtctttggggtcgacgatacatggcgcccaccacttgataaactggaagagcctacaggacagcctgctgtcgaccgcgttcttacaatactcaggcggttcgtgctggactgcgagcgccagtggggtcggcccagagccatcaccgtcgagcatacaaggactggattgatgggaccaacgcagcggcagaaaattcttaacgaacagaagaagaatcgggctgacaatgagcgtatccgcgacgaacttcgggaaagcggggtagataacccatcacgggcggaagttcggcgtcatttgatagtgcaagaacaggagtgccagtgtctgtattgtgggacaatgatcaccactaccactagtgaactggacgccatagtgccgcgggccggtggcggctcaagtaggcgtgagaacttggccgccgtctgtcgcgcttgtaatgccaagaagaaaagggagttattttatgcatgggccgggccggtgaagtcccaggagactatcgagagggtgagacagcttaaagccttcaaagactccaagaaagccaagatgtttaagaatcagatccgacgattaaatcagaccgaagcagatgaaccgatagacgagcgttctcttgcatccacttcatacgccgcagtcgctgtcagggagcggttagaacaacattttaacgagggtctggcacttgatgataaatcccgagtggtactggacgtgtatgccggcgctgtgacaagagagagtcgccgggcgggcgggatcgacgagcggattttattaaggggcgaacgggataagaaccgattcgacgttaggcaccatgcagtcgacgctgcagtgatgacactgcttaataggtccgtggcactgaccctggagcaacgtagccagctgcggcgcacattctatgaacagggactggacaagctggaccgcaatcaacttaagcctgaagaggactggagagatttcaccggcctggcccctgcatcccaggagaaattcttggagtggcggaaagctgccacaattctcggagacttgctggctgaggcaatagaagatgacagcattgcggttgtatcaccactccgccttagaccccagaacggatctgtgcaccttgaaaccatatccgctgtgaagaagcagacactcggttccgattggccagccgatgccgttaagagaatcgtggaccctgaaatttatcttgccatgaaagacgctctgggcaagctgaaggagctcccagaagactctgcacgaagcctggaactgccagatgggcgcttcgttgaagccgacgacgaagtcttgttcttccccgagaacgccgcatctattctgacacctcgcggggttgctgagattggtgggtcaatacaccacgcacggctctacggctggctgaccaagaagggagaactgaaggtagggatgcttagagtctacggggccgagttcccttggctgatgagggaaagtgggagccgaaacgttctgtccatgccaattcaccggggcagtcagtctttcagagatatgcaagatacaactaggaaggcggtggagagcggcgaagccgtcgagttcgcatggatcacacagaatgacgagctcgaatttgacccggatgactatatcgcccacggcggtaaggacgaactgcggcagttcctcgggttcatgccagagtgccggtggagagtcgatggctttaagaagaattatcagatcagaatcagaccagccatgctgtcacgagaacagctgccatccgatatacagaggcggctggagtctaaaacactgaccaagaatgaaagcttgctgctcaaggctcttgacacgggactcgtggttgcgatcggcggacttctcccattagaaaccttgaaggtgatacggcgaaacaatcttggatttcccagatggcgcggcaatggaaatcttccgacatcttttgaggtacgcagctccgctctccgagccctgggagtagaaggtcctaggggcggcggaggcagctacccctatgatgtacctgattatgcttctggcggacccaagaagaagaggaaagtcggtggttctcctaagaaaaagagaaaggtcggatccggcgccaccaattttagccttttaaagcaggctggcgacgttgaggaaaacccggggcccatggaccaagccaaacccctgagccaagaggagtctacactgatcgagcgggccaccgcaaccattaatagtattccaattagtgaggattattctgtggcatccgccgcattatccagtgatgggcgtattttcaccggcgttaacgtgtaccacttcaccggcggcccctgcgcagagctggtcgttttgggtacagcagcagcagcagccgccgggaatctcacctgcattgtggcaataggcaacgaaaatcggggaattttatcaccgtgtggtcgttgtcgccaagttctgcttgacctgcaccccggcattaaggcaatcgttaaagattccgacggccaacccacagctgtcggcatacgagagttacttccaagcggatacgtttgggaaggatag

SEQ ID NO: 708 - DNA, 6199 bp, synthetic construct
  source 1..6199: mol_type = other DNA; note = MMLV2_cloned_into_tethered_MG3-6(H586A)plasmid
atgcctaagaagaaacgaaaggttatgtcaacggacatgaagaactatcgtatcggggtcgacgtgggtgatcgaagcgtaggcctcgcagcgattgaatttgacgatgacggactgcctatacagaaactcgcattagtcaccttccgtcacgatggtggtctggatcctactaagaacaagacccctatgagtcgcaaggagacgcggggaatagccaggagaaccatgcgaatgaacagagagcggaaaagacggctccgtaacctggacaatgttttagaaaacttgggctactcagtcccggaaggaccagaacctgagacatatgaagcctggacctctcgggctcttctggcatccattaagctcgcaagtgccgatgagctgaatgaacatttggttagagcggtcagacatatggctcgacacaggggatgggccaatccgtggtggtctttagatcagctcgaaaaggctagtcaggagccaagcgagacattcgagatcatcctggcacgcgctagggagctgttcggagaaaaggtgcccgctaaccctacattaggtatgctgggcgccttagcggctaacaatgaggtactgcttcgacccagggacgagaagaaacgaaagaccggctacgtgagaggtacacccttaatgttcgcgcaggtcaggcagggagatcagctcgcggagctccgtcgaatctgcgaagttcaagggatcgaagatcaatatgaagctctgagattaggggtgttcgatcacaagcacccttacgtccctaaggaacgcgtcggaaaagacccactgaatccgagcacgaaccggaccatccgggctagtttggagttccaggaatttagaatattagattccgttgctaacctgagggtgagaatcggctcccgagctaaacgggagcttaccgaggcagagtacgacgcggccgtcgaatttcttatggattacgccgacaaggagcagccttcctgggctgacgttgcagagaaaatcggcgtacctggtaacaggctggtggcacccgtgttagaggacgtgcagcagaaaactgctccctatgataggtcttccgcggcatttgaaaaggcaatgggaaagaagaccgaagccagacagtggtgggaaagcactgatgatgaccaactgcggagtctcctgattgctttcctggtcgacgccaccaatgataccgaggaagcagcggcagaagccggacttagtgagttatataaatcatggcccgccgaggagagggaagcactctctaatatcgacttcgaaaagggaagagtggcctactcacaggaaaccttgagcaagttgtccgaatacatgcacgaataccgagttggcttgcatgaggccagaaaggctgtctttggggtcgacgatacatggcgcccaccacttgataaactggaagagcctacaggacagcctgctgtcgaccgcgttcttacaatactcaggcggttcgtgctggactgcgagcgccagtggggtcggcccagagccatcaccgtcgagcatacaaggactggattgatgggaccaacgcagcggcagaaaattcttaacgaacagaagaagaatcgggctgacaatgagcgtatccgcgacgaacttcgggaaagcggggtagataacccatcacgggcggaagttcggcgtcatttgatagtgcaagaacaggagtgccagtgtctgtattgtgggacaatgatcaccactaccactagtgaactggacgccatagtgccgcgggccggtggcggctcaagtaggcgtgagaacttggccgccgtctgtcgcgcttgtaatgccaagaagaaaagggagttattttatgcatgggccgggccggtgaagtcccaggagactatcgagagggtgagacagcttaaagccttcaaagactccaagaaagccaagatgtttaagaatcagatccgacgattaaatcagaccgaagcagatgaaccgatagacgagcgttctcttgcatccacttcatacgccgcagtcgctgtcagggagcggttagaacaacattttaacgagggtctggcacttgatgataaatcccgagtggtactggacgtgtatgccggcgctgtgacaagagagagtcgccgggcgggcgggatcgacgagcggattttattaaggggcgaacgggataagaaccgattcgacgttaggcaccatgcagtcgacgctgcagtgatgacactgcttaataggtccgtggcactgaccctggagcaacgtagccagctgcggcgcacattctatgaacagggactggacaagctggaccgcaatcaacttaagcctgaagaggactggagagatttcaccggcctggcccctgcatcccaggagaaattcttggagtggcggaaagctgccacaattctcggagacttgctggctgaggcaatagaagatgacagcattgcggttgtatcaccactccgccttagaccccagaacggatctgtgcaccttgaaaccatatccgctgtgaagaagcagacactcggttccgattggccagccgatgccgttaagagaatcgtggaccctgaaatttatcttgccatgaaagacgctctgggcaagctgaaggagctcccagaagactctgcacgaagcctggaactgccagatgggcgcttcgttgaagccgacgacgaagtcttgttcttccccgagaacgccgcatctattctgacacctcgcggggttgctgagattggtgggtcaatacaccacgcacggctctacggctggctgaccaagaagggagaactgaaggtagggatgcttagagtctacggggccgagttcccttggctgatgagggaaagtgggagccgaaacgttctgtccatgccaattcaccggggcagtcagtctttcagagatatgcaagatacaactaggaaggcggtggagagcggcgaagccgtcgagttcgcatggatcacacagaatgacgagctcgaatttgacccggatgactatatcgcccacggcggtaaggacgaactgcggcagttcctcgggttcatgccagagtgccggtggagagtcgatggctttaagaagaattatcagatcagaatcagaccagccatgctgtcacgagaacagctgccatccgatatacagaggcggctggagtctaaaacactgaccaagaatgaaagcttgctgctcaaggctcttgacacgggactcgtggttgcgatcggcggacttctcccattagaaaccttgaaggtgatacggcgaaacaatcttggatttcccagatggcgcggcaatggaaatcttccgacatcttttgaggtacgcagctccgctctccgagccctgggagtagaaggttctggcggcagcagcggcggctcaagcggaagtgaaacacctggaacttccgaaagcgctacgcctgaatcttctggtggatcttctggcggatcttccgcatgcactctgaacatcgaggacgaatacaggctccacgaaacttctaaggaacctgacgtgtccttgggatcaacttggttgtccgacttcccccaagcttgggccgagacaggcggaatgggtttggccgtgagacaggccccactcataatcccacttaaggcgacatccactccggtcagtatcaagcagtatccaatgtcccaggaagcacgcttaggaattaaaccacatattcaacgactcctggatcaaggtattctcgtcccatgtcaaagcccttggaatacccctcttctgcctgtgaagaagcccggcacaaacgactaccggcccgtgcaagacctcagggaagtgaataaacgagtcgaggatatacatccgactgtcccgaatccctataatctgctgtcaggtctgccaccaagtcatcaatggtatacagtactggacctgaaagacgcgttcttttgtttgcgactgcatcctacgtctcaaccgctgtttgcattcgaatggcgggaccccgaaatggggatttctgggcagctgacatggactcgtcttcctcaagggtttaagaactcccctacacttttcaacgaagccctgcatcgggatttagctgattttagaatccaacatcctgatctgattctcctgcaatatgttgacgatctgctcctcgctgcaaccagtgaacttgattgtcagcagggaacgagagctttactccagactctgggcaatcttggttaccgtgcttcagctaagaaggctcagatatgtcaaaagcaagtgaaataccttggttacctgttgaaggaagggcaacgctggttaaccgaagctcgcaaggaaacagtaatgggccaacccacacccaaaacaccccgccagctgagagaatttctcggtaaggctggattttgcagactgttcattcccggtttcgccgagatggccgcacctctttatccactgacgaagcccggtaccctcttcaactggggacccgatcagcagaaagcttaccaggagattaaacaggcactgctgaccgctcccgcgctcggcctgcccgacctgacgaaaccattcgagcttttcgtggatgagaaacaaggatatgctaagggagtgctgactcagaagcttgggccgtggcgacgcccagtagcttatctcagcaagaaactggatcctgtggccgccggttggccgccatgtttgagaatggttgccgctatcgcagtcctcaccaaagacgccggtaaactgacaatggggcaacctctggtgatcctcgctccgcacgctgtggaagccttagtgaagcagccacctgataggtggttaagcaatgcgagaatgacccattaccaagcgttattgctggataccgatagagtgcaatttggccccgttgtcgctctcaatcccgcgactcttctgcccttaccagaagagggacttcagcataattgtttggacattctcgcagaggctcatggcactcggccagatctcaccgatcaaccccttcctgatgctgatcatacttggtatactgacggctcatccctgctgcaggaaggccaaagaaaagccggcgccgctgtcacaacagaaactgaagtgatttgggccaaggcactccctgcaggaactagcgcccaaagagccgagctcatcgcccttactcaagctctcaaaatggccgagggcaagaaacttaacgtgtacacagactccaggtacgccttcgccacagcacacattcacggcgagatctatcgccgaaggggatggctgacgagtgagggaaaggaaattaagaacaaggatgaaatactggcgctgctgaaggctctgtttctccctaagcggctgtccattattcactgccctggtcaccagaaagggcattccgctgaagccaggggcaataggatggcagatcaggctgcaaggaaagctgcaattaccgaaacgcccgatacgagcacacttcttatcgagaactcttccccttcaggcggtagcaagcggacagcagatggatccgagtttgaacctaggggcggcggaggcagctacccctatgatgtacctgattatgcttctggcggacccaagaagaagaggaaagtcggtggttctcctaagaaaaagagaaaggtcggatccggcgccaccaattttagccttttaaagcaggctggcgacgttgaggaaaacccggggcccatggaccaagccaaacccctgagccaagaggagtctacactgatcgagcgggccaccgcaaccattaatagtattccaattagtgaggattattctgtggcatccgccgcattatccagtgatgggcgtattttcaccggcgttaacgtgtaccacttcaccggcggcccctgcgcagagctggtcgttttgggtacagcagcagcagcagccgccgggaatctcacctgcattgtggcaataggcaacgaaaatcggggaattttatcaccgtgtggtcgttgtcgccaagttctgcttgacctgcaccccggcattaaggcaatcgttaaagattccgacggccaacccacagctgtcggcatacgagagttacttccaagcggatacgtttgggaaggatagggatccgcaggcctct

SEQ ID NO: 709 - DNA, 6183 bp, synthetic construct
  source 1..6183: mol_type = other DNA; note = MMLV2_cloned_into_tethered_MG3-6(H586A)plasmid
atgcctaagaagaaacgaaaggttactctgaacatcgaggacgaatacaggctccacgaaacttctaaggaacctgacgtgtccttgggatcaacttggttgtccgacttcccccaagcttgggccgagacaggcggaatgggtttggccgtgagacaggccccactcataatcccacttaaggcgacatccactccggtcagtatcaagcagtatccaatgtcccaggaagcacgcttaggaattaaaccacatattcaacgactcctggatcaaggtattctcgtcccatgtcaaagcccttggaatacccctcttctgcctgtgaagaagcccggcacaaacgactaccggcccgtgcaagacctcagggaagtgaataaacgagtcgaggatatacatccgactgtcccgaatccctataatctgctgtcaggtctgccaccaagtcatcaatggtatacagtactggacctgaaagacgcgttcttttgtttgcgactgcatcctacgtctcaaccgctgtttgcattcgaatggcgggaccccgaaatggggatttctgggcagctgacatggactcgtcttcctcaagggtttaagaactcccctacacttttcaacgaagccctgcatcgggatttagctgattttagaatccaacatcctgatctgattctcctgcaatatgttgacgatctgctcctcgctgcaaccagtgaacttgattgtcagcagggaacgagagctttactccagactctgggcaatcttggttaccgtgcttcagctaagaaggctcagatatgtcaaaagcaagtgaaataccttggttacctgttgaaggaagggcaacgctggttaaccgaagctcgcaaggaaacagtaatgggccaacccacacccaaaacaccccgccagctgagagaatttctcggtaaggctggattttgcagactgttcattcccggtttcgccgagatggccgcacctctttatccactgacgaagcccggtaccctcttcaactggggacccgatcagcagaaagcttaccaggagattaaacaggcactgctgaccgctcccgcgctcggcctgcccgacctgacgaaaccattcgagcttttcgtggatgagaaacaaggatatgctaagggagtgctgactcagaagcttgggccgtggcgacgcccagtagcttatctcagcaagaaactggatcctgtggccgccggttggccgccatgtttgagaatggttgccgctatcgcagtcctcaccaaagacgccggtaaactgacaatggggcaacctctggtgatcctcgctccgcacgctgtggaagccttagtgaagcagccacctgataggtggttaagcaatgcgagaatgacccattaccaagcgttattgctggataccgatagagtgcaatttggccccgttgtcgctctcaatcccgcgactcttctgcccttaccagaagagggacttcagcataattgtttggacattctcgcagaggctcatggcactcggccagatctcaccgatcaaccccttcctgatgctgatcatacttggtatactgacggctcatccctgctgcaggaaggccaaagaaaagccggcgccgctgtcacaacagaaactgaagtgatttgggccaaggcactccctgcaggaactagcgcccaaagagccgagctcatcgcccttactcaagctctcaaaatggccgagggcaagaaacttaacgtgtacacagactccaggtacgccttcgccacagcacacattcacggcgagatctatcgccgaaggggatggctgacgagtgagggaaaggaaattaagaacaaggatgaaatactggcgctgctgaaggctctgtttctccctaagcggctgtccattattcactgccctggtcaccagaaagggcattccgctgaagccaggggcaataggatggcagatcaggctgcaaggaaagctgcaattaccgaaacgcccgatacgagcacacttcttatcgagaactcttccccttcaggcggtagcaagcggacagcagatggatccgagtttgaatctggcggcagcagcggcggctcaagcggaagtgaaacacctggaacttccgaaagcgctacgcctgaatcttctggtggatcttctggcggatcttccgcatgcatgtcaacggacatgaagaactatcgtatcggggtcgacgtgggtgatcgaagcgtaggcctcgcagcgattgaatttgacgatgacggactgcctatacagaaactcgcattagtcaccttccgtcacgatggtggtctggatcctactaagaacaagacccctatgagtcgcaaggagacgcggggaatagccaggagaaccatgcgaatgaacagagagcggaaaagacggctccgtaacctggacaatgttttagaaaacttgggctactcagtcccggaaggaccagaacctgagacatatgaagcctggacctctcgggctcttctggcatccattaagctcgcaagtgccgatgagctgaatgaacatttggttagagcggtcagacatatggctcgacacaggggatgggccaatccgtggtggtctttagatcagctcgaaaaggctagtcaggagccaagcgagacattcgagatcatcctggcacgcgctagggagctgttcggagaaaaggtgcccgctaaccctacattaggtatgctgggcgccttagcggctaacaatgaggtactgcttcgacccagggacgagaagaaacgaaagaccggctacgtgagaggtacacccttaatgttcgcgcaggtcaggcagggagatcagctcgcggagctccgtcgaatctgcgaagttcaagggatcgaagatcaatatgaagctctgagattaggggtgttcgatcacaagcacccttacgtccctaaggaacgcgtcggaaaagacccactgaatccgagcacgaaccggaccatccgggctagtttggagttccaggaatttagaatattagattccgttgctaacctgagggtgagaatcggctcccgagctaaacgggagcttaccgaggcagagtacgacgcggccgtcgaatttcttatggattacgccgacaaggagcagccttcctgggctgacgttgcagagaaaatcggcgtacctggtaacaggctggtggcacccgtgttagaggacgtgcagcagaaaactgctccctatgataggtcttccgcggcatttgaaaaggcaatgggaaagaagaccgaagccagacagtggtgggaaagcactgatgatgaccaactgcggagtctcctgattgctttcctggtcgacgccaccaatgataccgaggaagcagcggcagaagccggacttagtgagttatataaatcatggcccgccgaggagagggaagcactctctaatatcgacttcgaaaagggaagagtggcctactcacaggaaaccttgagcaagttgtccgaatacatgcacgaataccgagttggcttgcatgaggccagaaaggctgtctttggggtcgacgatacatggcgcccaccacttgataaactggaagagcctacaggacagcctgctgtcgaccgcgttcttacaatactcaggcggttcgtgctggactgcgagcgccagtggggtcggcccagagccatcaccgtcgagcatacaaggactggattgatgggaccaacgcagcggcagaaaattcttaacgaacagaagaagaatcgggctgacaatgagcgtatccgcgacgaacttcgggaaagcggggtagataacccatcacgggcggaagttcggcgtcatttgatagtgcaagaacaggagtgccagtgtctgtattgtgggacaatgatcaccactaccactagtgaactggacgccatagtgccgcgggccggtggcggctcaagtaggcgtgagaacttggccgccgtctgtcgcgcttgtaatgccaagaagaaaagggagttattttatgcatgggccgggccggtgaagtcccaggagactatcgagagggtgagacagcttaaagccttcaaagactccaagaaagccaagatgtttaagaatcagatccgacgattaaatcagaccgaagcagatgaaccgatagacgagcgttctcttgcatccacttcatacgccgcagtcgctgtcagggagcggttagaacaacattttaacgagggtctggcacttgatgataaatcccgagtggtactggacgtgtatgccggcgctgtgacaagagagagtcgccgggcgggcgggatcgacgagcggattttattaaggggcgaacgggataagaaccgattcgacgttaggcaccatgcagtcgacgctgcagtgatgacactgcttaataggtccgtggcactgaccctggagcaacgtagccagctgcggcgcacattctatgaacagggactggacaagctggaccgcaatcaacttaagcctgaagaggactggagagatttcaccggcctggcccctgcatcccaggagaaattcttggagtggcggaaagctgccacaattctcggagacttgctggctgaggcaatagaagatgacagcattgcggttgtatcaccactccgccttagaccccagaacggatctgtgcaccttgaaaccatatccgctgtgaagaagcagacactcggttccgattggccagccgatgccgttaagagaatcgtggaccctgaaatttatcttgccatgaaagacgctctgggcaagctgaaggagctcccagaagactctgcacgaagcctggaactgccagatgggcgcttcgttgaagccgacgacgaagtcttgttcttccccgagaacgccgcatctattctgacacctcgcggggttgctgagattggtgggtcaatacaccacgcacggctctacggctggctgaccaagaagggagaactgaaggtagggatgcttagagtctacggggccgagttcccttggctgatgagggaaagtgggagccgaaacgttctgtccatgccaattcaccggggcagtcagtctttcagagatatgcaagatacaactaggaaggcggtggagagcggcgaagccgtcgagttcgcatggatcacacagaatgacgagctcgaatttgacccggatgactatatcgcccacggcggtaaggacgaactgcggcagttcctcgggttcatgccagagtgccggtggagagtcgatggctttaagaagaattatcagatcagaatcagaccagccatgctgtcacgagaacagctgccatccgatatacagaggcggctggagtctaaaacactgaccaagaatgaaagcttgctgctcaaggctcttgacacgggactcgtggttgcgatcggcggacttctcccattagaaaccttgaaggtgatacggcgaaacaatcttggatttcccagatggcgcggcaatggaaatcttccgacatcttttgaggtacgcagctccgctctccgagccctgggagtagaaggtcctaggggcggcggaggcagctacccctatgatgtacctgattatgcttctggcggacccaagaagaagaggaaagtcggtggttctcctaagaaaaagagaaaggtcggatccggcgccaccaattttagccttttaaagcaggctggcgacgttgaggaaaacccggggcccatggaccaagccaaacccctgagccaagaggagtctacactgatcgagcgggccaccgcaaccattaatagtattccaattagtgaggattattctgtggcatccgccgcattatccagtgatgggcgtattttcaccggcgttaacgtgtaccacttcaccggcggcccctgcgcagagctggtcgttttgggtacagcagcagcagcagccgccgggaatctcacctgcattgtggcaataggcaacgaaaatcggggaattttatcaccgtgtggtcgttgtcgccaagttctgcttgacctgcaccccggcattaaggcaatcgttaaagattccgacggccaacccacagctgtcggcatacgagagttacttccaagcggatacgtttgggaaggatag

SEQ ID NO: 710 - DNA, 2244 bp, synthetic construct
  source 1..2244: mol_type = other DNA; note = MG151-118_cloned_into_untethered_plasmid
gctagcgccaccatgtacccctatgatgtacctgattatgcttctggcggcagcagcggcggctcaagcggaagtgaaacacctggaacttccgaaagcgctacgcctgaatcttctggtggatcttctggcggatcttccgcatgcacagtgacactcgaagatgagtacaggctccatcaagaacagaaacctccagaccaggaaatcgactcttggctgcaacggtttcccgaagcttgggccgagaccggtgggctgggcctggccaaacaccgacccgccattttcgtcgaagtgaagcccggcacggacccagttcgggtacggcagtacccaatgccgctgcgagcccgcgaggggataacccctcacataaggcggctccttgaccaaggagtgttgagagcttgccactcaagttggaatacacccctcttgcccgtacacaaacccaactcaacggactatagacccgttcaggacttgcgagaggtgaataaaagagtgatggacatccaccctacagtcccaaacccttacacacttctttctgcactgcatccagagaagcagtggtatacagtcctggatttgaaagacgcattcttttccctccctctggccccaaagagtcaggggctgtttgcatttcagtggacagatcctgagagaggtatcaatggtcagttgacttggactaggctgccccagggcttcaaaaactctcctactctgttcgatgaggctctccatgaggacctgggcgaataccgccgacaacacccagagataaccctgctgcaatatgtagatgatttgttgatcgctgccaggtcccctgagacatgtgtgcagggaactgaagacttgctgaagactctcggtgagctgggatatagagcatcagccactaaggcccagatctgcaagtctgaagtgacctatctcggctacttgttgaaagggggacagcgctggcttacaaaggcaaggaaggagaccgtgttgagaatcccaagaccccagagcactcggcaggttcgcgagtttttgggcagtgcagggttttgcaggctctggatccctggcttcgccgagcttgctaaaccattgtaccaagctaccaaggaacgccagcctttcaattggactgaggaagccgagttggctttccagcagattaaaacaagcctcctcagcgcacccgctctgggtctgccggatgtctcaaaaccttttcatctttatgtggacgagagcaaaggtgtggcaaaggctgtgttgacccaatatctggggccctggcaacggccggtggcatacctgtccaagaaactcgatagtgtggccgctggatggccaccttgcttgcagattattgcagccaccgcattgatggttagggacgccgataagctgatcatgggacaagagctgcgagtcatcacaccccatgctatagaaggagtccttcagcagcctcccgatcgatggatgagcaatgctcgcttgacccactatcaggggttgttgctgaatccactgagaatcacttttcttccacctacgtccctgaaccccgcttccctgcttccaaaccccgatctggatgctcccagccacgagtgtacggaaattttggctcaggtccacggagtgagggaggatctccaggatcggcttctcccagataccgaacttatttggtttaccgacggctcatcctacgttcatcaaggacagagatacgccggcgctgctgtgacatctgaaacagaagtaatttgggcagaaccattgccccctggcaccagtgcacaacgggctgaattgatcgcactgacgcaggcccttaccttgggcgccgagaagaagctgaccgtttataccgacagcaggtacgccttcgcaacagcacatattcacggggctatttaccgcgagaggggtctgctgactgccgaaggcaaggagattaaaaacaaacaggaaatcctggcccttctgaccgccctctggaagcctaaaaagctggccatagttcattgtccgagacaccagaaaccaactacaccaatcgctcgggggaatttcctcgccgaccagactgccaagtctattgcaaaggccccgtcccagctgcttgtccttcaactccctgacccgggacctcagcctaggcctaagaagaaaagaaaggtgggtggttctcctaagaaaaagagaaaggtctgagaattc

SEQ ID NO: 711 - DNA, 2070 bp, synthetic construct
  source 1..2070: mol_type = other DNA; note = MG151-119_cloned_into_untethered_plasmid
gctagcgccaccatgtacccctatgatgtacctgattatgcttctggcggcagcagcggcggctcaagcggaagtgaaacacctggaacttccgaaagcgctacgcctgaatcttctggtggatcttctggcggatcttccgcatgctctattagagcagtgcaggccattatccggggccacgccgagatcgaacccatttgcctgccccaaccgcgacgaatcaccaacacaaaacagtataggctgccaggaggccagcaggagattaccaagactgtgcaggagcttgaaagagtgggcatcatccgcccagcccatagtccttacaactctcccatctggcctgtgcggaaacccgatgggacctggcgaatgacagttgattatcgggaacttaataaagtgactcctcccattcacgccgcagttcccaatatcgcttcactgatggatacattgagcagggaaattgaaacttatcactgcgtcctggacctggccaatgcattcttctccataccgatcgcgaaagagtctcaggaccaatttgcttttacatgggaaggcaggcagtggacttttcaggtactgccccagggttacgtccacagtcccacattctgtcacaaccttgtggcccgagatctggcgaattggaacaaaccaagcacagtcaagatgttccactatatcgacgacctgatgctcactagcgacagtatcgaggctctcgaaaagaccgtgccaagcctgattacctacctccaggaaaaagagtgggccatcaacccacagaaggttcagggaccagggttgagcgtgaaatttctgggcgtcgtgtggagcggcaagactaaggtgctgccttccgctatcattgataagatccaggcattccctgtaccgaccaagcctaaacagttgcaggaatttttgggcatcctgggctactggaggtccttcattccacatctggcacagctgctcaaacctttgtacagacttactaaaaagggccaggtgtgggattgggggagaaccgaacaggaggctttccagcaggctaagattgccgttaagcaagcacaagcgttgggcatttttgaccctacactccccgctgaactcgatgtacatgtcacccaggaagggttcggatggggtttgtggcagagacagggaagtgtccggattcctatcgggttctggagccaaatctggcacggagccgaggagcgctactccatggtggaaaagcagctcctggctacctattcagccttgcaagctgtagagcctattacccaaacagcagaggtgattgtgaagaccacccttccgattcaagggtgggtgaaggatcttacacatataccaaaaacgggagtcgcgcagtctcaaacggtcgccaggtgggtagcatatctttcacagcgcagcaggctgagtagctctccactcaaagaggagttgcagaagatcctcggtcccgttacataccattctgagactccagaggaaatagtggttacctgccccgagaaaagcccggtgcaggagggtaagtatccaatacccgaggacgcttggtacacggatgggtcctcacggggtaatccttcacggtggcgcgccgttgcctaccatcccagtactgagaccatttggtttgaagagggagatgggcaatcctcccagtgggcagaacttagagccgtatggatggtcatcacgcaagagcccggcaactctgctctcaatatatgtactgactcatgggccgtctaccggggacttactctgtggatcgcccagtgggctacccaggactggaccatccacgcacgccctatatggggaaaggacatgtgggtggatatatggaatgtcgtgagacatagaacggtgagggcgtatcacgtgtccgggcaccaacctctgcagtccccaggcaacgacgaggccgacacactggcccgcgttagatggctgggttctacacctaggcctaagaagaaaagaaaggtgggtggttctcctaagaaaaagagaaaggtctgagaattc

SEQ ID NO: 712 - DNA, 2163 bp, synthetic construct
  source 1..2163: mol_type = other DNA; note = MG151-120_cloned_into_untethered_plasmid
gctagcgccaccatgtacccctatgatgtacctgattatgcttctggcggcagcagcggcggctcaagcggaagtgaaacacctggaacttccgaaagcgctacgcctgaatcttctggtggatcttctggcggatcttccgcatgcggcatagctgccgtggacacggataacatcaaacagttgtccgtgcttccaggactctctgaggatccctccgccgtgggcctgctccaggtaaaagagcagcaggtccccatagctaccaaggcagtgcaccgccgacaatatagaaccaatagagacagtcttctccccatccataagctcatccgacagctggaaagccagggagttattagccggacacatagtcctttcaactctccaatttggcctgttaggaaagcctctggtgagtggcggcttatggtcgattaccgagggctcaacgaggtgacacctcctctgtctgctgctgtccccgacatgctggaactgcaatatgagctggagtccaaggcagcaaaatggtacgcaaccatagatattgcaaacgctttttttagcataccactcgccagagaatgcaggcctcagtttgctttcacatggagagggatacagtacacttggaacaggctgccccaggggtggaagcatagccctacaatctgccacgggcttattcaaaccgtgctggaacaaggcagcgcacccgagcacctccaatatattgacgatattgtcgtatggggtgacaccgccgaggatgtttttaagaaaggcgaacagattatccagatcctgttgcaggccggcttcgccatcaaacgaagcaaggttaaaggccctgcacaggagattcagttcctgggcatcaaatggcaggatgggaggagacatattcctgccgatgttattgacaagatcacggcaatgtcacctccaattaacaaaaaagaaactcagagcttcttgggagtagtcggattttggcggatgcatgtgccaaattatagtcttattgtgagcccactctatcaagttacgagaaaaaagaatgacttcacttggggaccagaacaacaacaggcatttgaacagatcaagcacgagatagcccgggcagtcgctttggggccggtgcgcactgggcaagacgtgaagaacatcctgtacacagccgctggagagaagggacccacatggagcctttggcagcgcacctccggtgagacacgcggtcggcccttgggtttctggtccagggcttacagaggttctgaagaatgttacactcccaccgaaaaggagatcctcgctgcatacgagggcgtcagggctgcttccgaggtcgtgggaactgaaacccaactgcttctggctccccggttgcccgtactgaattggatgtttaaaggaaaaatacctagtacacatcacgccaccgatgcaacctggagtaaatggatcgctttgatcactcagagggctagaatggggaacttttctcgcccgggcatcctggaggtgatcatggattggccagagggcaagaagtttgaaacctcaccgggcgaggaggtatcacgagcaaaagaggccccaccttacaatgaattgcccgggaatgaaaagaagtatgccttgttcacagacggctcatgtcgcattgttggaaagtaccggcgctggaaagctgctgtgtggtctcctgtcaggcaggtggctgaagccactgaaggaaaaggtgaatcctcccagttcgccgaggtaaaggctgtgcagcttgccttggatgtcgcagaacgggaagggtggccagtgctgtatctgtatacagacagttggatggtggccaatgccctgtggggatggcttcagcagtgggagcagaacaattggcagagacgaggcaaaccaatctggtcagccgaactttggaaagatatagctgccagaattaagaatatggtggtcaaggttcgacacgttgacgcccacatgccgaagtcaagggctactgaggagcagaagaacaatcatcacgtggaccaagccgccaagattgaggtggcacagatcgacttggatcctaggcctaagaagaaaagaaaggtgggtggttctcctaagaaaaagagaaaggtctgagaattc

SEQ ID NO: 713 - DNA, 2244 bp, synthetic construct
  source 1..2244: mol_type = other DNA; note = MG151-121_cloned_into_untethered_plasmid
gctagcgccaccatgtacccctatgatgtacctgattatgcttctggcggcagcagcggcggctcaagcggaagtgaaacacctggaacttccgaaagcgctacgcctgaatcttctggtggatcttctggcggatcttccgcatgctctctgtctctggcagatgaacaccggctgttcgagagtcagcaagagcccgggggcgacatgacccattgggttaagcggttccccactgcttgggctgagaccgccggcacaggtctcgccaaacatctgcctccagtggtgatccagcttaaggcaagcgccctcccaatcagggtgaaacagtacccgatgccagaggaagctagacggggaattgcacctcatattcacaggctgatcaaagaaggagtccttagaccttgccagtctgcctggaatacaccacttttgcctgtgcgaaagccggggtctggagattacagacccgtgcaggacctcagaaaggttaatgaaagaacagaggacattcacccaacggtcccaaatccctacaccctgctttcccatttgccacccagccaagtgtggtatactaccctcgatctcaaggatgctttctttagcattcccctctccgaaataagccagcccctgtttgcttttgaatggcaggaagacggtgggcaatcaggtcagctgacatggacaaggttgcctcagggattcaagaacagtcctacgttgttcaatgaagccctgtcacaggatctcgagcccttccgccgctcccatccacgggttacactgctgcagtatgtggacgacttgctgttggccgcagaaaccagagaagagtgcatcaaggctaccgagcacctcttgacggagctgggggagttgggatatagagcttctgccaaaaaaactcatatctgtaagcgaagcgtaacttacttggggtacaggatagccgatggggcaagatggcttactgacgctatgaagcagaccatcctggcaattccctccccaactagcacccgcggggtgagagaatttcttgggtcagctggcttctgtaggctttggatccctggatttgcagaaatagctaggcccctttacgaagctacaaaggaggcccctgattggagctggggcgagagagagcagcaggcattcgaccagcttaaagacgcacttcttcaggcacccgccctcgccctgccagaccctacacgcccatttactctgtttgtagacgagaaaaaaggagtagcaaaaggcgtcctgacgcagcagctcggcccctggaagcggcccgttgcttactttagtaaaaagctggatgccgtggccgctggctggcctccttgcctgaggatcatcgccgccattgctgtcctcgtacgagaggcagataaacttacattcggccaggcactgtgggttacagccccacaccccgttgagggtattctcaagcaaccaccgggcaaatggatgacaaacgctcgcctgactcattatcaagggctcctgttggatagcccccgaattacattcacagatccagtcatcttgaaccccgctaccctgctgccgaatcccgaactgcagacccctgtgcacaactgcaaggagtttctttcagaagttacccaggtgcgcgccgacttgaaagataccccgttgtccggatgtaaattgaactggtacacagatggttcttcattcttccaagacggagctcgaagagctggagcagcagtcgtggaccaggagggcaataccgtatggagtagtgccttgccaccaggcacttcagcccagaaagctgaacttatcgctctcgccgaggccctggagcgggccaagggaaagagggtgaatatatataccgattcccggtatgcttttggtactattcacgtgcacggtgcaatatatcgagaacgcggatttaggaccgcagaaggcaagcatctgaagaacttggctgaagttcaacggcttctgatggccgtggagaagcctaaggcagtcgctgtcatgtatgtccctggccaccaaagtgccaaaactcctgaggccgtgggcaataacagggccgaccaagaagctaaacgggtggccatggtgtctcctcctatggagacggggcagccatccactgtcgccgctattcctaggcctaagaagaaaagaaaggtgggtggttctcctaagaaaaagagaaaggtctgagaattc

SEQ ID NO: 714 - DNA, 2256 bp, synthetic construct
  source 1..2256: mol_type = other DNA; note = MG151-122_cloned_into_untethered_plasmid
gctagcgccaccatgtacccctatgatgtacctgattatgcttctggcggcagcagcggcggctcaagcggaagtgaaacacctggaacttccgaaagcgctacgcctgaatcttctggtggatcttctggcggatcttccgcatgcacagtatccctgcatgatgaacataggttgcatcaaatatctagcccacctatgctggatattgacaactggttgaaacaatacccccaggcatgggctgaaactggcgggatgggcctcgccaaacatagacctgcagtgtatatcgagttgaagccaggagctgatcccgtgcgagtacgacaatatcccgtttcactggaggctaggctggggataacaccccgcatttggaggctgctgaaagaggggatcctgcgcccatgtcagtcagcttggaacacccctctcctcccagtgcggaaacctcatacaaacgattatagacctgtgcaggaccttagagaagttaataaaccggtcatcgacatacaccccactgtgcccaatccctacacactgctgtccagcctggcccctactcgaacttggtatacggttctcgatctgaaagatgctttcttcagtctcccgcttgctcccaaaggacaggatctgttcgctttcgagtggacagacccagaagagcggatccacggtcagctgacatggaccagactgcctcagggattcaagaactctccaactatatttgacgaggcactgcacgaggacttgggggagtttcggacccagcatccagacctgacccttcttcagtatgttgatgatctccttatggctgttgagacgcaggctgcttgtctcaggggtacaaagtctcttctgcagatgttgggagacctgggctatcgggcttccgccaagaaggcacagatttgcaaaactgaggtgagctaccccggctacaagcttaaggatggccagaggtggttgacggaagctcgaaaggaaaccgtcctgaaaatatccaccccacagaatgcaagacaggttagagagtttcttggcactgcaggattttgcaggttgtggatccttggctttgcagaactggccaggcctctctacgaagccgccaaagaaagtaagaagttccagtggaccgaggcaactggaatggcatttaaaagactcaaggaagctctcctgagtgccccagacctggccctcctcgacctgactaagcccttccatctctacatcgacgaaaataagggcatcgctaagggggtgctcatgcaatcacttgggccttggaaaagaccaatcgcctaccttagcaagaaactcgacagcgtggcagccggttggccaccgtgtctccggattattgccgctgtagctatgcttgtgaaagacgccaataagctgacctggggccaagagctttacattattacgcctcacgcaattgaaggaatcttgcagcagccacccgacagatggctctctaacgctcgattgactcactaccagggcctcctgctgaatcctgcacgcattgtctttcaacggccaccgccacccgcaacattgaaccctgccactctccttccggctcccgatctggattctccgcttcacgattgcactgagatacttgcacaagtgcacggtgtcagagaagatctgcaggatcagcctcttccaaatgccgaggtgacctggtatacagatggatcctcatacatcaaagatggaatccggtatgccggcgctgccatcaccacagaaacggaaactgtctgggccgaacctctgcctgctggtacctcagctcaacgcgctgaactggttgcactcaccaaggccccaaccctcgggaaggataaacggcttaatgtcttcaccgacagtaggtacgcctttgctaccgctcatgtccacggaaatatctatagggagcgccgcctcctcaccgccgagggtaaaaccatccaaaacaaagacgagattctggccctgctgaaggccctgtggttgcccaagcagcttgcaattattcactgccctggccaccagaaacccacaacacccgtggccaaggggaacaacttggcccaccaggtgacacgcgaggtggcccttcaggtagactgtgcattgatgacaacattgcctgacccagggcccgccagccctaggcctaagaagaaaagaaaggtgggtggttctcctaagaaaaagagaaaggtctgagaattc

SEQ ID NO: 715 - DNA, 2163 bp, synthetic construct
  source 1..2163: mol_type = other DNA; note = MG151-123_cloned_into_untethered_plasmid
gctagcgccaccatgtacccctatgatgtacctgattatgcttctggcggcagcagcggcggctcaagcggaagtgaaacacctggaacttccgaaagcgctacgcctgaatcttctggtggatcttctggcggatcttccgcatgcggcattgctgctgtggatacggacaacattaaacagttgtccgcacttcccgggctgagtgaagatccatccgtggtgggtctgttgcaggtaaaggagcaacaggttcctatcgccacaaagacggtgcacaggcgccagtatcggacgaatagagacagtctgctcccaatacataagcttatacggcaactcgaagatcaaggcgtcatttccaagactcattctccattcaattctcctatctggccagtgagaaaggccagtggggaatggcgcctgacagtggactacagaggacttaatgaggtcactccacccctttccgctgcagtccctgatatgctcgagctgcagtacgagcttgagtctaaagcagctaagtggtacgcaaccatcgatattgccaacgcttttttctcaataccactggccaaagagtgcaggccccagttcgccttcacttggaggggcgtgcagtatacatggaaccggctcccgcagggctggaagcactctccaactatctgtcatggacttattcagacagtgctggagcagggatcagctcccgaacaccttcagtatatcgatgacatagtggtgtggggcgacaccgcagaagaggtgtttacaaaaggtgagcgcataattcaaatcctcctttgcgcaggtttcgcaattaaacgaagcaaagtgaaaggacccgcacaggaaattcagtttctcggtatcaaatggcaggatggccggaggcacatccccacagatgtgatagataagatctctgccatgagcccacctactaacaaaaaagaaacacaatcattcctcggcgtagttggtttctggcggatgcatgtgcccaactatagtctgatcgtctcccctctgtatcatgtcaccaggatgaaaaacgaatttacctggggacccgaacaacaacaggcctttgagcagatcaagcaagagattgccagggctgtcgcccttggccccgtccgaatggggcaaggaatcaaaaatatactttatacagctgctggcgaaaaagggcccacctggagcctgtggcagcgagccagcggcgaaactagagggaggccactcggcttctggtccagggcctaccggggatctgaagaaggatacacccctactgagaaggagatcctggcagcctatgaaggcgtgagagctgcttcagaagttatcgggactgagacccagctgttgctggcaccccgccttcctgttctgaattggatgttcaagggaaaaggaagtagctcccaccatgctacagacgctacttggagcaagtggattgccttgatcacgcagcgcgcccgcatggggaacttgaatagaccaggtattctggaggtcattatggactggcctgaaggcaagaagtttgggaccccgcctgctgaagagatcagccgcgccaaggaggctcctccgtacaatgaactgcctgagaacgagaaaacctatgcactttttacagacggaagctgttgcatagtagggaagcacagacggtggaaggcagccgtttggtcacccacaaggcaggtcgcagaagcaaccgaaggcaaaggagagtcatctcagtttgctgaggtcaaggctgtgcagttggccctggacgtagccgagagggagagatggccaatgttgtacgtgtacaccgatagttggatggtggctaacgctctttggggttggctccagcagtgggagcagaataactggcagagaaaagggaagcctatttgggctgccgacctgtggaaggacattgccgcacgaattaaaaatatggtgatcaaggttagacacgtagacgcccacgtaccgaaaaaccgagccaccgaagaacaacagaataatcatcaggttgatagggcagctcggatcgaggttgcccaaattgacctggatcctaggcctaagaagaaaagaaaggtgggtggttctcctaagaaaaagagaaaggtctgagaattc

SEQ ID NO: 716 - DNA, 2163 bp, synthetic construct
  source 1..2163: mol_type = other DNA; note = MG151-124_cloned_into_untethered_plasmid
gctagcgccaccatgtacccctatgatgtacctgattatgcttctggcggcagcagcggcggctcaagcggaagtgaaacacctggaacttccgaaagcgctacgcctgaatcttctggtggatcttctggcggatcttccgcatgcgggatcgccgcagttgacactgaaggcgtgcagcaattgtcaattctgcccggactttctgaagatccctccgctgtcggcctgctcagagtgaaggaacaacaggtccccattgctaccaaaactgtgcatcgcagacagtaccgaaccaacagagacagcctccttccgattcaaaagttgatccaccagcttgaaaatcaaggcgtcatcagtaagactcattccccctttaattctcccatttggccagtgagaaaagcatcaggggagtggcgactgactgtagattatcggggtcttaacgaggtgacgccacctttgagcgcagccgtgcctgatatgctcgagctccagtacgagctcgagagcaaagccgctaagtggtatgcaacaatagacatcgcaaatgcttttttcagtatccctctgaccaaggagtctcgaccacaattcgcattcacatggcgaggtattcaatatacctggaataggctgccgcagggttggaagcactcacccacaatttgtcatggtcttatacaggccgctctggagcagggcggagcccctgaacatctgcaatacatcgacgacattattgtgtgggggaatactgccaaggaggtgtttgagaaaggcgagcagatcatacagatcctgctcagggcagggttcgcaatcaagagaagtaaggtgaaaggaccagctcaggaaattcagtttctgggaattaagtggcaggacggccggcggcacatccccacagatgtgatcaataaaatttcagcaatgtcaccccctaccaataaaaaggaaacgcagagcttccttggcgttgtgggtttctggagaatgcacgtacctaactatagtctgatcgtgagcccactttaccaagtgacacggaaaaagaatgacttcatgtgggggccagagcagcagcaagcttttgaacagataaagcaggaaattgcccgggccgtcgccttggggcccgtgcggatggagcaggacgccaaaaacattctgtacacagccgccggagaaaaggggccaacttggagcctctggcaacgcgcttccggcgagacccggggaaggcctctcggtttttggtccagggcttatcgcggcagcgaggagtgttatacgcctacagagaaagaaattttggccgcttatgaaggcgtgagagcagcttctgaagtaatcgggactgaaacacagctgcttctggcaccaagacttcctgtcctcaactggatgtttaaagggaagggccccagtactcatcacgctaccgacgccacctggtccaagtggatagccctgatcacccagagagctaggatgggaaaccttaaccgcccagggatcctggaagtcatcatggattggccagagggaaaaaagtttggcacacccccggctgaagaaattagccgcgctaaagaggcacctccatacaacgagttgcctgaaaatgaaaaaacatacgctctcttcaccgatggatcctgctgcatcgtgggaaagcaccgacgatggaaagccgcagtttggtctcctactaggcaggtcgctgaggctacagaaggcaaaggtgagtcatcccagttcgccgaggttaaagcagtccaactggccttggatgtcgccgagcgcgaacggtggccgatgctgtacgtatatacggactcttggatggttgctaacgccctttggggatggctgcagcagtgggagcaaaacaactggcagcgcaagggaaagcccatttgggccgccgatctttggaaggatatagcagctaggatcaagaatatggtgataaaagttaggcacgtggatgcccatgtaccaaaaaatagggctaccgaagagcagcagaataaccaccaggttgaccgagctgccagaatcgaggttgcacagatagatttggaccctaggcctaagaagaaaagaaaggtgggtggttctcctaagaaaaagagaaaggtctgagaattc

SEQ ID NO: 717 - DNA, 2169 bp, synthetic construct
  source 1..2169: mol_type = other DNA; note = MG151-125_cloned_into_untethered_plasmid
gctagcgccaccatgtacccctatgatgtacctgattatgcttctggcggcagcagcggcggctcaagcggaagtgaaacacctggaacttccgaaagcgctacgcctgaatcttctggtggatcttctggcggatcttccgcatgcggtattgctgctgtggccgtagaggggatcaaacaacttaataccctgcctggcttgtcagaaaaccctagcgccgtaggcctgctgaaggtggaggaacagcaagtccccactgccacttccaccgttcaccgacggcagtaccggactaacagagacgctgtgattccgattcacaaaatgatacgggagctggaatcccagggggtggtaagcaagacccacagcccgtttaatagcccaatttggccagtgcgaaaaagtgatggtgagtggcggctgacggtggattatagggctttgaatgaagtcaccccaccattgtctgccgcagttcccgacatgctggagttgcagtacgagctggaatcaaaggctgctcgctggtatgccacaatcgatatagcaaacgcatttttcagtatccccttggccgccgaatgcaggccgcagtttgcatttacatggaggggagtacagtacacatggaacagacttcctcagggctggaagcattcccccaccatctgccacggtctgatccaagcagcacttgagaaaggggaggcccccgagcacctccaatacatcgacgatataatcgtgtggggaaatacagctgtcgaagtcttcgaaaaaggcgaaaaaataattcagattttgctgcgggctggatttgcaattaagaaaagcaaggtaaaaggacccgcacaggaaattcagtttctgggcgtgaagtggcaggatggtagaagacagattccaaccgaagtcatcaacaagattaccgcaatgtctccaccaacttcaaaaaaggagacacaggctttcctcggagctatcggattctggcggatgcatatacctgagtattcccagattgtttcacccctgtatctggtgacaaggaagaagaatgattttcattgggggcctgaacagcagcaagctttcgcccagatcaaacaggaaatcgcacacgccgtggcactgggtcccgtccggacagggcctgaggtgaagaacgtgctgtacagcgcagccggcaaccatggcctcagctggagtttgtggcagaaagtccctgacgagactaggggaaggcctctggggttctggtccaggtcataccgaggctctgagggaaattacacaccaaccgagaaggagatcctggccgcttatgagggagtgcaagcagcttccgaggtcatcggcatggaagctcaactgctccttgccccacggctgccagtgttggggtggatgttcagagggaaggtgccaagcacacaccatgcctcttcagctacatggagcaagtggattgccctcatcactcagcgcgctagaattggcaaacttaataggcctggaattttggaagtgatcaccaactggccggagggagaatcattcggtgtgacggacgaggagcaggaacccgtttctagggccgaggaagcccctccatacaatcagctccccgctgaggagactagatatgctctttttaccgacggctcttgtcgcattgttgggatgaaccgaaggtggaaggccgccgtttggagtcctacccgccgcgtcgccgaagccactgagggtgaaggcggaagttcccagttcgcagaacttaaggcaatccaactggctttggatatagctgaacgcgagaagtggcccaagttgtatttgtatacggactcctggatggtcgccaatgccctgtgggggtggctcgagcggtggaaagaggctaactggcagagaagaggcaaacctatctgggcagccgaggaatggaaggacatagcaactcgcctcgaaaaactccctgtgaaagttcggcacgtggatgcacatgtacccagatctcgagctaatgaagagcaacagaacaatcagaaagttgaccaagccgccaagatcggcgttagtaaaatagaccttgatcctaggcctaagaagaaaagaaaggtgggtggttctcctaagaaaaagagaaaggtctgagaattc

SEQ ID NO: 718 - DNA, 2172 bp, synthetic construct
  source 1..2172: mol_type = other DNA; note = MG151-126_cloned_into_untethered_plasmid
gctagcgccaccatgtacccctatgatgtacctgattatgcttctggcggcagcagcggcggctcaagcggaagtgaaacacctggaacttccgaaagcgctacgcctgaatcttctggtggatcttctggcggatcttccgcatgcggcatcgccgcagtcgaagcagaagggacgcgccagctgaatactctgcctggtctgagtgagaatccctctgccgtgggccttctgaaagtcgaagagcagagagttcctatcgccacatccacagtacatagaagacagtacagaacaaatagggacgctgttattcctatccataaaatgataagagagcttgagtctcagggggttgtctcaaagactcacagccctttcaattctcccatctggcctgttaggaaatccgacggtgaatggagattgactgtagattacaggggactcaacgaagtgacccctccgctgagtgcagccgtaccagatatgcttgagctgcaatatgaactcgagtctaaagcagccaagtggtatgccaccattgacatagctaacgccttcttttcaattccactcgccgctgagtgtaggccacagtttgccttcacctggaggggagtgcaatatacctggaaccggctgccccaggggtggaagcacagcccaactatttgccatggcctgattcaggctgctctggagaagggtgaggctcccgagcacctgcagtatatcgatgatataattgtctggggcaatacggctacagaagtgtttgaaaagggagaacgaatcattcagatactgcttcaggccggttttgccattaaaaaaagcaaggtgaaagggcccgctcgagagatccaatttctgggcgtgaaatggcaggacgggagaaggcagattccgactgaggtgatcaacaagattactgctatgtccccgcccacaaacaaaaaggaaacccaggccttccttggagctatcggattttggcggatgcacataccggagtactcacagattgtgagccctctctaccttgtcacacgcaaaaaaaacgatttccattggggtccagaacagcagcaagctttcgctcaaatcaagcaggaaatcgctcacgcagttgccctcggacctgtgcgcacgggaccagaggtgaagaatgtcctctacagcgcagcaggaaataacggcctgagttggagcctctggcagaaggtccccggggaaactcggggccggccacttggtttctggtctcggagctatcggggctccgaggcaaattatacccccaccgaaaaagagatcctcgctgcatacgagggtgtccaggctgcttctgaagtgattgggacggaagcacagcttcttttggcaccaagattgccagtgcttggctggatgtttaaaggcaaagtgccctccacccatcatgccactgatgcaacatggagtaagtggatagctctgataacacagcgagcccggatcggcaatcccaataggccaggaatcttggaaattattacaaactggccagaaggagagactttcggcttgagttccgaggaagaggaggaacaagtcacaagagccgaggaggcccctccatataatgagcttcctgaatccgagcgacagtatgctctgtttaccgatggatcatgccggattgtcggggcatctaggaaatggaaggctgctgtatggtctcctacaaggcaggtggcccaggcagccgaaggcgaagggggcagctcacaattcgccgaactgaaggccgtgcagcttgctttggacatcgccgaacgcgaacgctggcctcgcttgtacctttacaccgattcatggatggtggccaatgctctgtggggatggctcgagaggtggaataaggccaactggcaacggcgagggaaacccatctgggctgcagaggagtggaaggacatagcaaccagagttgagaagctgagtgttaaggtgcggcacgtggacgctcacatccccaagagccgcgccaacgaggagcatcacaacaaccagcaagttgaccaggcagccaaaattgaagtatcccaaatcgatctggaccctaggcctaagaagaaaagaaaggtgggtggttctcctaagaaaaagagaaaggtctgagaattc

SEQ ID NO: 719 - DNA, 2160 bp, synthetic construct
  source 1..2160: mol_type = other DNA; note = MG151-127_cloned_into_untethered_plasmid
gctagcgccaccatgtacccctatgatgtacctgattatgcttctggcggcagcagcggcggctcaagcggaagtgaaacacctggaacttccgaaagcgctacgcctgaatcttctggtggatcttctggcggatcttccgcatgcggcgtcgctaccgttaatgccgaaaaaattaaacaacttagtaccctgcccgggttgtccgaggacccttttatcgtggggctgcttcaagtggaagaacagcaggtgcctattgctacacgaacagtccaccggcgccagtatcggacgaacagagacagtcttgccccaattcatgagcttattcaccacctcgaaagccagggtgtgatctccaaaactcattctcccttcaacagcccaatctggcctgtgcaaaagagtgatggcggttggcgactgaccgtagactaccgaggactcaacgaggtaacacccccgctttctgctgccgtgcctgacgtgttggagctgcaatacgagctcgccagcaaagctgctacgtggtacgcaaccatcgatatagctaatgccttctttagcatccccctggccgccgagtgcaggcctcaattcgccttcacctggaggggcgtccagtacacatggaataggttgccgcagggctggaagcattctcccactatctgtcatgggctgattcagacagccctcgagcagggcgaggcaccagagcacctccaatatattgatgatataattgtctgggggaatgaagccgaggaggtgtttgaaaaagggaagagaatcatccagatcctgcttaaagccggtttcgctataaagaaatcaaaggtaaaaggacctgcccaggagatacagttccttggcatcaaatggcaggacggaaggcggcatgtcccaatggaggttgttaataagattgcatccatgtctcccccagcaaacaaaaaggagacccaggcttttctgggcctggtgggattttggaggatgcatatcccaggctacagccagcttgtgagtcccctgtaccgcgtgacacggaaaaagaattatttcgaatggggaccggagcagcaacaagcttttgaacatatccggcaggagattgcacgcgctgtggctctggggcctgttcgcaccggtccagacgttcagaatattctgtacaccgccgccggcgatcacgggcttacttggtcactgtggcagaaaactcctggagaaactcgggggagaccattgggcttttggtctcgagggtatcgaggatctgaagctcattacacccccactgaaaaagagatccttgctgcatatgaaggtgtgcgcgcagcctccgaggttgtgggtacagaggcatatctgttgctcgctcctagattgcccgtgcttcactggatgttcaaaggaaacattccttccacgcaccacgcaacttccgcaacttggagcaagtggattgctctcatcacccagcgcgcaagattggggaagtcaaataggccaggcatactggaagagattatggattggcctgaaggtcgcgattttggagccagtcccgaagaagtagctagagctcaggaggctcctccatataacgagcttccagaagatgaacgatgttacgccctgtttacagatggatcttgcagagtcgtgggcaaccaccggaagtggaaggcagcagtgtggtccccgacccggcaggtagttgaggctacagaaggagagggcgagtcatcacagttcgcagaggtcaaggctattcagctcgccttgaatatcgctgaaagagaaaagtggcccgtcctgtatctgtatactgacagctggatggttgccaacgccttgtggggctggctccagcagtggaagaagacaaactggcagagaagaggaaagcccatctgggcagccgccctctggcaagacattgccgcaagggtggaacacataacactccgggtgaggcatgttgacgctcacgtcccaaagagcagggccacggaagagcacaggaacaatgagcaggtcgataaagccgctaaaatagaaatcgcacaagtagacctggaccctaggcctaagaagaaaagaaaggtgggtggttctcctaagaaaaagagaaaggtctgagaattc

SEQ ID NO: 720 - DNA, 2160 bp, synthetic construct
  source 1..2160: mol_type = other DNA; note = MG151-128_cloned_into_untethered_plasmid
gctagcgccaccatgtacccctatgatgtacctgattatgcttctggcggcagcagcggcggctcaagcggaagtgaaacacctggaacttccgaaagcgctacgcctgaatcttctggtggatcttctggcggatcttccgcatgcggcgtggcctctgttaatactgagaaggtgaagcagctgtcaaacttgccaggcctctctggggaccccttcgttgtcggcttgctcagggtcaaggaacaacaagtgcctattgccatgcggacagtacatcggaggcaataccgaactaatagggaccctctggccccaattcaagaactgatcaggcagctcgaaacgcagggtgtcatctctaaaacacatagcccatttaactccccaatctggcctgtgagaaaatctgatggcggctggcggctgacagtggattacagaggcttgaatgaagtaaccccacccttgtcagctgcagtaccagacatgctggagctgcagtacgaacttgagagcaaggctgccaagtggtatgctactattgatatagccaatgcttttttcagcattcctctcgcagaggagtgcaggccccaattcgctttcacctggcgcggagtgcagtatacctggaatagattgccgcagggatggaagcacagtccaacaatatgccatggattgattcagacagccttggagaaaggggatgctcctgagcatcttcaatacatagacgatattatcgtatggggcaacaaagcagaggaggtctttaaaaaggggcagaaggtcatcgagatactcttgcgcgctggattcgctataaagaagtccaaggtcaaagggcccgcccaagagatccagtttctgggcattaagtggcaggacggcagaaggcatgtccccatggaagttgtcaataaaattgccgcaatgtcacctcctactaacaagaaaggtacccaggccttcctcggtttggtgcgattctggcgaatgcacatacccggatactcacagctggtgagtccattgtaccaggtcacgagaaaaaagaacaacttcgaatggggcttggagcagcagcaagcctttgaacacattaagcaggaaatcgcccgcgcagtcgctctcggccccgtgagaaccggacccgatgtacagaatgtgctttatacttcaacaggagagcatggtcttacatggtccctgtggcagaaagtggccggcgaaaccaggggccggcctcttgggttttggagcagggggtataggggttccgaagcccactatactcccaccgagaaagagattctggcagcatatgaggggatccgcgctgcatccgaggtggtgggaaccgaggcccagctgctgctggctccacgactgcccgtgttgcactggatgtttaaaggaaatatccctagtacccaccatgctaccagtgcaacatggtctaaatgggtggccttgattacgcagagagctcgccttgggaagccaaatagaccgggaatcttggaagagatcatggactggccggagggtcgagactttggggcactgcccgaggaagttgcccgggctcaggaagcacccccgtataatgaactccctgaagacgaaagacggtacgcactgttcactgacggtagctgtcgggttgtcggaaaccaccgcaaatggaaggctgcagtgtggagtcctactaggcaagtggtggaggcaacagaaggcgagggggaaagcagccagtttgcagaagtgaaagctattcagcttgccctgaagatcgctgaacgagaaaagtggccagttctctacttgtatacagattcttggatggttgccaacgccctctggggatggctgcaagagtggaagaaaaccaactggcagcggagagggaagcctatctgggctgctgccctttggcaggacattgcagccagagttgaaaacgtggcccttaaagtgcgccacgtagatgcccatgttgccaaatcccgggccactgaggagcaccagaacaatgagcaggttgataaggctgctaaaatcgaggtggctcaactggacctggatcctaggcctaagaagaaaagaaaggtgggtggttctcctaagaaaaagagaaaggtctgagaattc

SEQ ID NO: 721 - DNA, 1923 bp, synthetic construct
  source 1..1923: mol_type = other DNA; note = MG151-129_cloned_into_untethered_plasmid
gctagcgccaccatgtacccctatgatgtacctgattatgcttctggcggcagcagcggcggctcaagcggaagtgaaacacctggaacttccgaaagcgctacgcctgaatcttctggtggatcttctggcggatcttccgcatgcatgcccatagtgtggctgaccgaggagccagtgtgggtgcctcagtggcctctgccaagcgttaaactggccgccgcaaaagacctggtaaaaacccagctggagttgggccacatccagcattcaacgagcccatggaacacccccattttcgtgataaagaaaaagtccggccagtggagactgctccatgatctccgagcggtcaatgctcagatgcagcttatggggcccgtccagcgagggctgcctctcctctctgcaataccgaaggactggcacgtgattaccatcgacataaaggactgctttttctctatccccctgcaccccaaggattcacaacggttcgcatttactctgcctagtctgaatcacgaggaacctgatcaacggtatgaatgggtcgtgctgccccagggaatggctaattcccccaccatgtgccagatttttgtcgccaaggtcctttcacccatccgccagaggtaccctagcattaaggttgtccactacatggacgatatattgctggcagcgaaaagtgagagtctcgtgtccgaagcttatcgcgacctgacccaaagcctcgcgaaagctggcctttatattgccccagaaaaggttcaaacaggaactcttatcacgtacttgggaaccaccatgaactacaacaaactgtctccccagaagatcactatcaggacccaggaccttaaaaccctcaacgatttccagaagttgctgggagatattaactggatacggggttacctgcatatccctaacattacattgcagccgttgtacgccatcctgaaggggagccccgatctggcaagtccacggattttgacggaagaggcaagagaagccctcggtaaggtcgaaaaagccctgcaacatgcttccctgaataggttccaggatactaagccttttcaactctgtatccttgcaacagccagacagccaaccggagttttgtggcaggaaggtcccctcttgtggatccacccctatgtctctccaaacaagagtctcgagcattatcccgaggccgttgctttgttggcattgaaaggcatccaacagggggtacagttcttcggacaaccaccattctcactcattattccgtactcaaaggagcaggttaatgtgctttgtgccacactggacatatgggctgtgctgtgttgcagctttcagggcaatatcgataatcattacccagctcacccactcatccactttatcaaacgccatcctattatcttcccaaaggtgacttcctcaacgccgataccgggcgccgtgaacatctttacagacggcagcaagactgggatcggcgcgtatgtgatcaacgacagccctcccgtacagcatcagtttacacctggcaacccacagcaggtggagttgcagattgtgatcgaggtgtttaaagcctgctccttccccttcaaccttatctctgatagcgtttacgtagtccaggccctgcaaattttggaaactgtgggtgccatctccacatctcacaatgtgtccatttacttctcccaactgcaacagctgattacatctaggaccgagcccttttatcctgtacacattcgctctcacacaagcctgcctgggccgctgtctcaggggaatgcttgcgccgacgcagccactagaagtcagcttgtgtgtttggctcctaggcctaagaagaaaagaaaggtgggtggttctcctaagaaaaagagaaaggtctgagaattc

SEQ ID NO: 722 - DNA, 1953 bp, synthetic construct
  source 1..1953: mol_type = other DNA; note = MG151-130_cloned_into_untethered_plasmid
gctagcgccaccatgtacccctatgatgtacctgattatgcttctggcggcagcagcggcggctcaagcggaagtgaaacacctggaacttccgaaagcgctacgcctgaatcttctggtggatcttctggcggatcttccgcatgcgctaacagcaaaccgcttgaagtgcctactgcccttcccttgaagtggctcaccgagaagccaatttggatcaagcagtggccattggccgaagataaactccaagctctggaacagctcgtgcaagaacagagagacgccaaccatatagaagaaagcacctctccgtggaatagtcctgtgtttgtagtcaagaagaagtctggcaaatggcgcatggtgaccgatctgcgggcggtcaacaaagtgattcaacctatggggcctctgcagagcgggctccctctgcccagtctgctgcctaagcggtggcccctgatcataatggatctgaaggagtgtttctttacaattcccctccaggagaaggatagggaaaaatttgccttcaccgttcccacttacaacaacagccaaccctctcgaagctaccagtggacagttttgccacaaggaatgctcaattccccgatactctgccagtatttcgtgaataagtcacttgagataatacgcaagcagttcccaaagtcaatcatttaccactatatggacgatattctgctctctgactcaaataaggacacccttgagagcatgtttgaggaagtgaagaaggtgctgccccggtggggtttgcagatcgcccccgagaagattcagagggaagactccataaactacctgggctacagaattggactggaaaaaatccgaacccaaaaagctcagatcaggagggacagactgcgcacattgaatgatttccagagactgttgggagatattagttcccttcggccggcggtgggtatcacccctgatctcatcgtgcatcttaataaaaccctcgatggcgacaaggatctgaacagcccacggaagcttacagtagaggccgaaaaggaactcaccatgattgaagaaaaattgcaagaagcccacgtagatcgggtgaacccaaacctgagttctatccttgtgatcctcccatcacgaatcagccccactgggatcttgatgcagagggaggacatcatactggagtggatcttcatcccacacaaaccatcaaagaaactgaaaacctatgtcgagaaagtctccgagctgattatcaaagggaagctgaggctgcgccaattggcgggaattgaccctgcagagattatcgtcccatttacgactgaggagatcaggaaactgtgggaggacaatgaaccttggcagcgggcctgcgcaaactttctcggcgagattagtagtaattaccccaaatccgatcgccttaaccttatcaaacgaacgagctggatccttcccagaattgtccgcgatgcacccatcaccggggctcgcacattttatacagacgcaaataagtctggaaaggccggttacaaatccgaggagttgtctaaagtggagcagtccccatacaattctgttcagaaggcagaactgtatgctattttgatggtcctgagagacttcaaggagcctctgaatattgttactgactcccagtatgctgagagagttatcctgcacatcgagactgccgagttcattcctgacgacactgagctcacgtccctgttcatagaagtgcaggatattattagaaacaggctgtgtcctatgtatattacacacatccggagccatacaggtttgcccggcccgctggcacagggcaacgctgagatagaccagttgctgatcggctcagtactccgacctaggcctaagaagaaaagaaaggtgggtggttctcctaagaaaaagagaaaggtctgagaattc

SEQ ID NO: 723 - DNA, 1923 bp, synthetic construct
  source 1..1923: mol_type = other DNA; note = MG151-131_cloned_into_untethered_plasmid
gctagcgccaccatgtacccctatgatgtacctgattatgcttctggcggcagcagcggcggctcaagcggaagtgaaacacctggaacttccgaaagcgctacgcctgaatcttctggtggatcttctggcggatcttccgcatgcatgcctatcccgtggcttactgaggaggcagtttgggttcctcagtggcccctctcctccgagaagcttgaggccgcccaccatctcgtgcaggaacagctgcaactcggacaccttgaaccaagtgtctcaccatggaacacacctattttcattatcagaaagcgaagtgggtcatggcgcctgctccatgacctgagggccgtcaatgctcagatgcgattgtttgggccagtgcaaaggggtcttcccctgttgagcgctcttcccaaggaatggaaagtaatcatcatcgacatcaaggactgctttttcagcatcaggctgaataccaaggataaggagaggtttgccttcacattgccggcgatcaaccatgagcagccagacgcaagattccagtggaaggttctgccccaagggatggcaaacagccctacaatttgtcagctctacgttcaacaggcactggctcccatcagagaaaactaccctaaacttaagattatccactacatggacgacatacttttgtgtagtccacagtcagccgaagtggaggaggcttacgtgaagctgacaaaatctctggagacctggggcttgaacattgccagcgaaaaggtgcagaagtcaagcgtgagtaagtttctcggcgctactatttacaccgacgtgatttgcccccagaaactgaaaattcggcacgatcagttgaggaccctgaatgatttccagaaactcctcggtgatattaattggctgcgcccttttttgcgggttcctacgaccgatcttaagcccctctttaagattcttgaaggtgactcccagttgacatcccctcgctcattgactccggaggcggttcaggctatccataaggtggaacaagcactgatgaccgcacaacttaatcggattcagctcaatgagccatttgagctgtgcatactcccaacccctggcctgcccactgccgtgctgtggcagagaggaccgctgctttggatccatccccaggcgtcccaggcccgaactatcgagtattaccccgctgcaatagctaacctggcattgagaggcgtcaaaaatagcttcacatattttggaaaagccccagcgactatcataaccccttataatatggaacagatccaaatactctgcgcaatgaacgatgactgggccatcctggcctatagcttctctggcaccttcgataaccactttcccaagcacccacttatcaatttcgccagaaaccatcctttggtgttccctcgggtaacatctctgacacccctgccacacgggaagaccgtgtataccgacggcagcaaaacaggaacgggcgcatatgtgcacgatggggaagtggtcactaaaaactacactcctaatacgccccagattgtggagtgtcacatcgtccttgaggtactgcagacgttccatgagccactcaacattgtgtctgattcctcctatgtcgtgaatgccgtcaactccctggaagtagctggactgataaaagcctcttctagtgtcgccacactcttcaaacagattcaatcacagctgcttttgcgccggagcccgttgtacatgacccacatccgcgctcattctggcctgccagggcccatgactcaaggaaaccacctggccgatatagccaccaggagtattgcttttcccctgcttgaccctaggcctaagaagaaaagaaaggtgggtggttctcctaagaaaaagagaaaggtctgagaattc

SEQ ID NO: 724 - DNA, 1950 bp, synthetic construct
  source 1..1950: mol_type = other DNA; note = MG151-132_cloned_into_untethered_plasmid
gctagcgccaccatgtacccctatgatgtacctgattatgcttctggcggcagcagcggcggctcaagcggaagtgaaacacctggaacttccgaaagcgctacgcctgaatcttctggtggatcttctggcggatcttccgcatgcatgcgcgctatcgatctcccagtgccccacgcagacaaaattaaatggaagagcgatagtcctgtatgggtggatcagtggcctctgaaccaggagaagctcaccgctgctaccaaacttgtgcaggaacagctggctgccggccatctggaaagcaccacctccccttggaatactccaatttttgtcatcaagaaaaagtctgggacctggagactgctgcaggacttgagagaaattaacaaaaccatgtttagcatgggggcgctgcagccctcattgccgagcccaattgccataccagcaaattactttaagataataatagatctcaaggactgcttcttcacaatccccctccaccctcaggatcgggagcggtttgccttctctattcctgtcactaacttcaaggggcccatgcataggtatcagtggaaggtcctcccccagggcatggccaactccccaacactttgtcagaaatttgtggcacaggccgtggaccccctgagaactagatggccgtctatttatatcatacactacatggatgacatactgttggctggagcaagccgcacccaggtcttgacctgcagccaggagttgacaactcacttgactttctttggtctccaaatcgcgcccgataagatccagcttacggacccatactattatctgggttttgagctgacctggaataagatcacaacgcagaagatccgcctccggacctctcacctgcatacactgaacgacttccaaaagtttctcggcgatataaactggctccgcccctacctgaagctcacaaccggcgaactgaaaccacttttcgacatcttgcagggtgaccccaacccaagcagcccgcgagatcttagcacagaagcgaaagagacacttaacatcgttgagacagccatccagcaacagcagatcaccttcctgtcatacgataggcctttcgcgcttattatttgtaatactccccatacaccaacaggcgttctgtggcagaataaccccctgctgtggattcacctcccgagttcaccatctaaagtattgatcacttacccattgctggttgcaaagattatcaagatgggcagagagaagtcacggcagtactttgggcgagaccctgaccaacttattatcccctacaccaaggaacagatcgactggcttttgcaaaacgaggacgattggattattgctctgacgtccttccagggaaagattgataatcactatccttcccacaaactcttgcagttcagtaggctgcacccgtttatcttccctaaaatcacctcatcaacgccactggataacgcaccactggtgttctccgatggctcctcctccggaatcgctgcctatgtgatcaattctcaatctcatagcatccaaagtccttttaaaagtgcccagttggtggaactgttcgctattctccaaatattcaaagtgttgtctcaagtccccttcaatctctatacagacagcgcctatatcgcatactccgttccgattttggagaccgtgcctcacattaaaccctccactaatgccgtatcattgttccaacagctgcaaacttttatcctgaggaggcaggcccccttttacattggacatctgcgggctcatacggacctgcctgggcctctcagtcagggaaatgccttggccgaccagaacactcgatttacttacagtgtgcctaggcctaagaagaaaagaaaggtgggtggttctcctaagaaaaagagaaaggtctgagaattc

SEQ ID NO: 725 - DNA, 1983 bp, synthetic construct
  source 1..1983: mol_type = other DNA; note = MG151-133_cloned_into_untethered_plasmid
gctagcgccaccatgtacccctatgatgtacctgattatgcttctggcggcagcagcggcggctcaagcggaagtgaaacacctggaacttccgaaagcgctacgcctgaatcttctggtggatcttctggcggatcttccgcatgcgtgtcagcccccgatccccctgtaccccatgcagacaagatcatctgggaaacccagattccagtttgggtcgatcagtggcccctcacccaggagaagctcaaagctgcttctatgctggtgcaggaacagttggccgctgatcatgtggagccctcaaccagcccttggaacacgcccatatttgtcatcaaaaaaaagtctggtaaatggcggctgctgcaggacctgagggcaattaacagagtaatgcggccaatgggcgccctccagcccggaatacccacaccagtcgcgattcctaaggattattacaagatggtaatcgacctgaaggactgcttcttcacgatccccctgcaccctgaggaccgcccttacttcgctttctctctgccccggatcaacttccaagggccaatgcagaggtttcagtggaaagtgctcccacaggggatggccaactccccaagcctgtgccagaaatacgtggcccaggctgtagatcctgtgagaaaacgatggccacagatttatatcctgcactacatggacgaccttcttattgccgcacccgatacgcacaacctgaacggatgttatttggatctgtataaagctcttaccactctggggcttcaaattgcaccagataaggttcagacacaggatccttacacttatttgggcctgcagcttcaagggaatcaaatccaaacccctaagatccagttgcgcgttgaccacctgcacaccctcaatgactttcaaaagctcatgggtgatatacagtggctgagaccctacttgaagctgccgacctgtgttctgctgccactcaatgacatcctgaagggcgactctcacccgacttccccacggaagttgacaccagaagcacaacaggccctgaatcaggtcactaaggcaataactcaacagttcgtgactcagataagttataatcttccgctgatcctcgttattttgcacaccccgcatactcctacgggaattttctggcagcgcgatccccattttaagaacaagggttgccctttgttttgggtgcacttgcctactacatccagcaaagttatcacagtctaccccgcacaggtggcctccgtgattgtgaaaggccgattgttgtcaaggcagcactttggaaaagaccccgacaagatactcatgccctacacaaaagatcaaactcagttcctccttcagaccgaagatgagtggtccatcgccctgtccggatttttgggcacaatcgataaccacttgccaagtgaccccctgctgcattttgcgcagcttcacccttttatttttccgaaaatcacgcagaaggccccaatcccgcaggctctgacagtgtttaccgacgggagttccaatggatgcgccgtgttcgtcgtcggcaatcagcctacaacattcgaaaccgcataccaaagtgcacaactggtggagctgttcgccatcgcccaagtgttcatcacctttttggacaaaccagtcaacatttacaccgacagcgcgtatattgctcattcagtgcctcttctcgagatctctcccgccattaaggcctctagcaatgcagcgttccttttccatcagctccaacagctcatacagaccaggcgccaccctttctttcttggccatattagagcgcatagcgacctccctggcccacttactcaggggaacgctcaggctgatgccgctacatgttcaattttcccaatctttgccagccctaggcctaagaagaaaagaaaggtgggtggttctcctaagaaaaagagaaaggtctgagaattc

SEQ ID NO: 726 - DNA, 1944 bp, synthetic construct
  source 1..1944: mol_type = other DNA; note = MG151-134_cloned_into_untethered_plasmid
gctagcgccaccatgtacccctatgatgtacctgattatgcttctggcggcagcagcggcggctcaagcggaagtgaaacacctggaacttccgaaagcgctacgcctgaatcttctggtggatcttctggcggatcttccgcatgcatgagacctcgacctttgagtatcacttggttgtccgatgacccggtgtggatagaacagtggcccctgactaaagacaagcttcaggcagcaactcttctggtgcaggaacagctccgggtggggcatattgtacctagtaccagtccctggaataccccaatcttcgtcatccgcaagggctcaggtaagtggcggctgctccaggatctgagggcgatcaacaataccatgcagccaatgggaccgctgcaacccggcctgcctttcccaaccgctataccgaaagactggcatctgattattcttgatctgaaggactgtttcttctccataccactcgctccccaagactgcaagagatttgccttctccctgccctccatcaactttagagaaccttatcagcgctttgagtggacagttctgccccagggcatggctaatagcccaacaatgtgtcagtacttcattgccaagattctccagccgttcagacagcagtttccaaatttttacctggtgcactacatggatgatatactcctcgccggacccgataggaaggctctgtttcggagttacgaggtactgcagtctttgctcaaaggggcaggcctgatcatcgccccggaaaaagtccagatccaatacccctacaattatctcggctatactataaacaaagttggcattacccctcaaaggccccaattccaggtcaaccaactgaaaaccctccatcagtggcagaccttccttggggagatccaatggctccggccatcattgcacgtgcctacaggtgaattgaagccactttatgacttgctgagaggcgatccatctccgacaagccccaggaaacccacaccagaggccctcaaagccctgagactgatcgagactgcgttgcaggagatgcaggtcatgcaggtggactactcccagtctctgctgttcattgttcttccttctaagcttactcctacgggggttttctggcagacaggacctatctactgggttcacctgcccgcctctccttcccgcgtgttgatcccttttcacgacctcgtaattcaacttgtgtggaaggcgaagtacctgggagacgccctgttcggaaaaacattcgatgtgttgatcctgccctacaaccaggacattctgagtaagctccgccaggagcatgatttgtggtgcctgtttttttgctctttcatgggccaggtggacaatcactatcccaaaagcaggctgttggagtctttgaagacatgcccaatcatctttcctaaaattcttaagaaagacccactcccaggggcccagacggtatttacggatggtgctaagaacggattcgctgtggtcagcgacgggacgcaagtgattcgaaaacgcgtcgccgactgtagcgcacagaaggctgaggtggccgcgctgatcctcgccctgcagacttatagcagcgttccactcaacgtgttcaccgatagcctctacatcgcacggcttgcctcagcaattgaaaccgccccttatattggcaagcagtcaaccattatggatcagctccaaacagtccaattgctgatatgggctagggcagaccccttgtttatcgggcacatccgatcacactccggacttcccggtcctctggccgccggcaacgctatggctgatgcagctacacatgcaaccaattttatatataccattactcctaggcctaagaagaaaagaaaggtgggtggttctcctaagaaaaagagaaaggtctgagaattc

SEQ ID NO: 727 - DNA, 1956 bp, synthetic construct
  source 1..1956: mol_type = other DNA; note = MG151-135_cloned_into_untethered_plasmid
gctagcgccaccatgtacccctatgatgtacctgattatgcttctggcggcagcagcggcggctcaagcggaagtgaaacacctggaacttccgaaagcgctacgcctgaatcttctggtggatcttctggcggatcttccgcatgctttagggaaatgtccatcgcccccagcttcgcgctccctctcaaatggctgacgaagcagcccatatgggtcgagcaatggcctctcacgaaggagaagctgtctgctctcgagaaaatcatccaacagcttctcaaggaagacagaatcgagacttcagtgagcccatggaatagtccaattttcgtgattaagaaaaagtctgggaaatggaggcttattacagatctgagaaagataaacactgtgattcagcccatgggtgcactccagccagggctgcctcagccgagcatgatcccgaaaaactggttcctgacaattatagatctcaaagattgtttcttcactatcccactgcaaccccaggaccgagagaagtttgcttttaccattccgtctctgaataacaataaacctacatcacggtatcaatggaaagtgctgcctcaaggaatgcttaactcccctacactgtgccagttttacgtcaaccagcctctggagagactccggtccttgtttccttccgccctggtaatccactacatggatgacgtgctgtttgcacattacgataagataaagctgaaacagctggtaacaaaagcagagagcgttctgggtgagtatggcctcattattgccaaggaaaagattcaggaacagccgccatttgaatatctggggaataagctggaccagacaaggatctggccccaaaaagtcgagcttcgcagagattgtctgcacactctgaatgatttccagaaactgttgggtgacatcaattggcttaggcccagcctcgggattcccacctacgccctcaaaaaccttttcctgaccttgcagggagaccccgcgttggattcccctcgctcactttccaccttggccgaaaaagagctccttcaaatcgaacagatcatgcagaccgcttatctggacagaatcgaccctaatgagccagtggtactggttgtgtttcccagtcaacattcaccaaccggtatcttttggcaaaaagatctgatcctcgagtggttgttcttgcccaataaagaacaggagcgattgagcacttacctggacaagatatgcaagattatcgctaagggccggctgaggctgcggcatttgattggaacagatccacagcaaatcattgtcccactgacccagcaggagatcttgtgccagtataagcttagtaacgaatggcagctggcacttcaggattttcttggcgacatccataacaacttccctaaaaataagcgcttgcagttcctgaagaagacacaatggattttgcccagtatagtgaaaactaagccaatccctaaggcagacactttctttacagatgcgaacaaacttggaatggctggctacaccggacccaagacccgagtggagcagacaccattccgcagcgtccagaaggctgaactcgccgcaataatcatgctcttgcaggactactctgacccgttgaatttggtgacggactcacagtatgctgaacacaccgtgaaggagatagaaacggccacccttattgccgatgggtctgagatcgttcagctcttctccattcttcagctgctgatccgcaacagatctcagcccatctttataacccacattcgggctcacactgccctccccggcccaatgagtgccggcaatgaacaaatcgacaggctgttgattggcaacgttcaggcagccatggaccctaggcctaagaagaaaagaaaggtgggtggttctcctaagaaaaagagaaaggtctgagaattc

SEQ ID NO: 728 - DNA, 792 bp, synthetic construct
  source 1..792: mol_type = other DNA; note = MG160-17_cloned_into_spCas9(H840A)_tethered_plasmid
aagattcagaacaataatttgtgggacaataggtttaagatagccaaaaacggaggcgagacttggatctacgtgccgagcgattcaagtcggaaactgggccttacgatcaagaaacatatttcaagcaactgggacatccccgactatttctaccactttaaatcaggcggccatatcgaagcggcaaaattacatctgaatcactgtcatttcgcttctatcgacctcaaacaatttttcagcagcctctctctgagtagagtcactagggctcttaagaagttctggccttacgaagaagccaggatcttagccaagtatagcgtggtcaaatgcctcgacaatagaaccggccaatgcaccatgatccctttcggcttcgtgcaaagtccaataattgcatccctgtgcctcgagcagtctcatctgggcacagtcctgaataagatttacgaaatgcagggaattaaagtctccgtatacgtggacgatattataatctctggaaacaacctggaacttttggaagaacagtataggtgcttgctgggagcagtggagaagtcaggcctccaaacctcagaatataaaaaccaggaacctagctccgagattacagtgtttaacatgaagcttaagcaccagtcccttgaacttaaggacgaactgatcaataaattccacagtaagttccaggccacggacaatagcaatatccgcgatgggatactgaggtacctggtgagcgtgaatccagaacagtccaagctgtttatcgaaaattccaaa

SEQ ID NO: 729 - DNA, 768 bp, synthetic construct
  source 1..768: mol_type = other DNA; note = MG160-28_cloned_into_spCas9(H840A)_tethered_plasmid
actattgaagtgcagcgatgggaggataagttcgaaatcaaaccgggtgtctgggtttacgtgccttctgttgaggcccgtaaggtgggcggcaaaatcctccaggctgtgaggaataaatggattccgccactctatttttaccacctccgtaccggaggccatctgaaggcagcccgcttacacttaaaatccgatttctttgccgtggtggatataaaacagttctttcaaagtacgtcaaggagccgtatcacccgagacctgaagtcttacttcacatacagccaggctagagagatctctactttctcaactgtgcggaatctttcccattctcctcataaacacgtgcttccatttggatttgtacagtctcctatcctcgccactctgtgtctggacaaatcctactttggctccctccttagacggttgaacaaacaccatgatctgaagctgtcagtgtttatggatgacgtcattatctctagtaatgatctggcacagctgcaggccgcttatgatgaggctctggtcgcaatgcgtaaatcaggttaccaggcgaacatgagtaagacacaggctccaagtagtaaaatctccgtgtttaacttgactctgagcaaaggtgtgatgaaagttacatctcaaaagatgagtgatttcttgattgacttctatagtagtaattatgaacctcataggatcggagttaaaaattacgttgaggccgtcaatcctggtcaggccaaacttttcaagctc

SEQ ID NO: 730 - DNA, 762 bp, synthetic construct
  source 1..762: mol_type = other DNA; note = MG160-31_cloned_into_spCas9(H840A)_tethered_plasmid
caaaattcacataagtggctctcaagattccggctcaagagcaacacatgggtttttatacctacgttagagaccgtaaaggaaggcaagctcttaaaaaaggtcatcgagtttaagtggcccccacctcccaattactatcacctgagatccggcggacacgtggacgcggtgaaatatcacatgggggggagattctttgtacatgcagacattaaaaagttttttaatagcataaatcggagtagaattaccagagagcaaaagccctactttggttacgagaagagtagggctatcgctatggagtccactgtgagcatccctttggattccgggcaggtatttgcacttcctttcgggttcgttcaaagtacaataattgcaagcctctgtctgagaaagagctctctcggaaacactatcgagatgctgaacaagaccgatggagttagggtgtctgtctacgtggatgacattatcgtcagcacacagtgtctgaaaaaggccgagactgcactgcttatgatccaaaagagtgccgagagatcagggttcagtctcaataaggaaaaaagccagggaccatctgacaaaattacagttttcaatattgacctgaagcagaacctgattgaaataacatcctggaggttcaatgaactgcttagtagttacaagaatgcgtccagcgataagcaaaagtctggaatatgggggtacgttaatagcgtaaacagtgcccaggcctccatgttagtg

SEQ ID NO: 731 - DNA, 753 bp, synthetic construct
  source 1..753: mol_type = other DNA; note = MG160-37_cloned_into_spCas9(H840A)_tethered_plasmid
ccgcagaagtgggacacccgtttccaactgaagcctggaacctgggtgttcgttcctaccgacgaagcaagagagctgggttacgtcatcaaagagctggtagagacaaggtggcgaccccccaaaaactatttccacctgactaatgggggacatgtgagggccatctcctcccacgtgcataataccaccttcgcccatctggatatacaggacttcttcggtcacattaacgcaagtagagtaacacgatggcttactcccctcgctggttatgctaaagctcgggagtttgccaaagcatctacagtcccctacccaaatcacggagggaccatgctcccttttggattcgttcaatccccaatacttgcctccctctgtcttttccactcagcactcggtagatgtctcgctgaacttccccggaagttaggagccgtagtttcagtctacatggacgacatcattttaagcgccagcgatcactccgtgctggaacaggctgtgaaaatggtcgaggagagcgccgagagaagtggactcccattaaatcccgataagcatgaaggccccgcagctggtataacagcttttaatatagcattagcacaccagtctctgcgaatcaacgacgaacgttggaactcctttttaaccgagtttcaggcctctgacaacgattcagtccgcaggggcatccattcctacgtgcatagtgtgaacgtggagcaggcgaataacctgggactt

SEQ ID NO: 732 - DNA, 822 bp, synthetic construct
  source 1..822: mol_type = other DNA; note = MG160-40_cloned_into_spCas9(H840A)_tethered_plasmid
agcctcacatgggttcacaggttcgaaagaaaacctgggaggtgggttttcgagccttctgaggaagccagaaagcaaggcgctgagatcaaagctctgattgagactcattggaaacctccctccttttactttcatctccgccagggcggccatgtggctgctcttagagcacacctcgcttctacttggtttgtgaagctggacatagctgatttctttggatccgttagtagaagcagaattgctaggcttctcaaggagttcgtgccttacagggacgccttgcacatggcaaccagtagtaccgtgcgacatccaacagaagtcagtcgcctgatgttgccatacggattcgtacaatctccagttatcgcgtctctggcattagctaagtctgcgcttggaaagtacctgagaactcttcactctgaccaggatttggtagttaccgtctatatggacgacgtaatcgtttctggtgtggatgagcacaggttagccgatgtcgcccaaaaattggacagtttggccaaacgaagccgcttcgagttgaatgccgataaaactcacgggcctcttgccaaactgagggcttttaatatcgatctggccgacgctgcaatggtaatagccccaaatcggctggaccaattgaaaaatgtgcttgaggaatccaccaatggtttccaaatcgagggaattagatcctatgtcaaaagtgtgaatgaggaacaggcggccgagctcggtgatccgttggctggcactgacacagaaccacatggcgcaagcaaggatgatctcggcaagccacccgcc

SEQ ID NO: 733 - DNA, 729 bp, synthetic construct
  source 1..729: mol_type = other DNA; note = MG160-51_cloned_into_spCas9(H840A)_tethered_plasmid
ccagtccgttttgaaaactattctcactctttcgacctgaacggaaaaccagtgttcgctcctagtaaactcggccggcgaattggaaatgacatcaaagataaggtagaaaatgcgttcgctttcgaagatttttactaccatctccgcaagggagggcatgtcgctggcattcactcccataggtctaatagatactattgtaaattggatattgaaaacttcttctactccgtcgcccggaatcgtgtcgttaggtcactgagggaaatctcagttccaagagcctcccactatgggaagtggtcctgtgttaaaaatccctttctgaatccttcttacgccctgccatacgggtttgtgcaatcacctatcttagctacactggtccttgcccgaagcgccctcggaaccgctctggcaaggctctcagctcatgccaatgtagccgtctacgttgatgatataactttatcatccaatgatctgcggagcctgaaagcttgttactccgagcttctggctgcctttggcgacgctaacttttctcctaacatgcttaagtgtgtggccccatgcaagaacctcaccgtgttcaattgcagtcttgtccacgaggagacactggttgagcccgctagaatagccgagtttcatagatttcctagatccgctgcatccatggaagggttcgagaggtactgcgattcagtcaggcgaggtaatgct

SEQ ID NO: 734 - DNA, 756 bp, synthetic construct
  source 1..756: mol_type = other DNA; note = MG160-52_cloned_into_spCas9(H840A)_tethered_plasmid
atcattaagtggcacactaaatttaagctgacccacgacaagtgggtgttcgttcccaatgcaaactccagggagaagggcctcgccattaagctgtttcttgttaagaagtggaagttcccatgctactactggcacctgcgggatcagggacatatcggagccatcacatcccacctggatgacctctacttctacaagttcgacttacagaacttcttttctcagattaataagtccaagataacccgcgcacttactccaatcgttggttataagagcgctagggagataaccactgagagtactgttaaaaaccccgactataattcagagaacaatatgttcattctgccctatggatttatccagagtcccataatcgccagtattgcactgcacagctccatcctggggaaatatattcaggtcttaacagagagtttcaatgtgtcaatttacatggacgacattatcatcagctcacgacaccctatcgatcccaaaattgtgactgaacttgactggtatagtcgattagctaaactgccgatccaacacgctaagacccaggggccaagtggtaagattacggtattcaatatcgatctctcttacaagagtctgatcgttactccgaagagattgaatcagtttaagaccgcctacatcgaaaccagttctgaggacgttagggcaggaatccttaattacttattaagtgtgaatgcggcattgtataaaaactttcctaat

SEQ ID NO: 735 - DNA, 768 bp, synthetic construct
  source 1..768: mol_type = other DNA; note = MG160-53_cloned_into_spCas9(H840A)_tethered_plasmid
cactcataccctagatggcatcacaagtacgaactcaaacctggggtctgggtgttcgagcccaccgaggaaacggtactgattggcaacgaaatcaaaggcgcagtgcaaaacaagtggataatcccgtacaattactatcaccttaatctggggggccacgtggccgccctcaacctccacaaaagcgacaccgtgtttgtgcacttagacatcaagaaatttttcaacaccatcaacaaatctcgcatcaccaggtcattgaaatcattatttaattatccaacctctcggaagtacgctcttttgtcaactgtcaaacaccccaataagagtcccgtgacttttatcttaccctatggcttcgtccagagccccatattggccagtctgtgtctgagacagtccgttctcggcattaaaattgacaacttgagtaagtcatccttggtgaggatcagcgtatacatggacgatataattattagtggaaaagatgaaaatctgttgagtgtcctggtgtctgaactcaaactgtccgccgacaagtctgggttcatcttgcacaaggaagaaggacctgcccggactataactgcctttaatattcgtctgtccaataataacaccgtgatcacttacgacagatataaagagctttggcacgactataatgggagtaaaaattacaacgttaagcatggcattgccacctatgtgtccacagtcaacgtcaagcaactgctcgggttagacggtcctcttatt

SEQ ID NO: 736 - DNA, 774 bp, synthetic construct
  source 1..774: mol_type = other DNA; note = MG160-54_cloned_into_spCas9(H840A)_tethered_plasmid
ccttttatcagcctttggattgatcgcttcgaaattaaacctggcagttgggtgtacatcccttccgacgagtgcatgagtctgggcaaatccctgaaaaagtttctcgaggcgcgatggactccgcctaagtactattttcaccttcaggatggcggtcacgtatcagccctgcgcgcacatttttccagcacttatttcctgcatttagacatcaaaaagtttttcggctctataaacaagtcacgagtgacacggtgtcttaagaagtacatgtcctataaggaagcaagaatagccgcatcttatagcagtgttaaaatcccaggcagccgaaatagcaaatatgagctgccctatgggttcgttcagtccccactgctggcatccatctgtttgagatcaagtcgattagggagagtgctgcaccagatctatcttgacggccatccaatttcagtgtacgtcgatgacatagttatctccggcaccgatataggggagttagagcgtattaaaaaggaaatattggaagctgccaacttttcaaaattgagtattaatgagaagaaatccgaaggcccagccgcaaaaatcacggcctttaatatagaactctctaatgggaagctggaggtaacgtatgacaggctggagtcatttgtctcagcctatctttcttccggttccgaagcacagagagacggtattctgggttatgtctctacagtgaatacgcatcagtgtactgaactgtcttcccgcctcgtaaag

SEQ ID NO: 737 - DNA, 729 bp, synthetic construct
  source 1..729: mol_type = other DNA; note = MG160-55_cloned_into_spCas9(H840A)_tethered_plasmid
gctttcaactacgaatacagtttcgagaaaaatggaaaatttatttttgtgcagaataaagatgggtttagccacgctcactcattattgaaatttatcgacgaaaatattacattcccttctaattattttcattatcgcagcgggggacacgtggctgctttacaccagcatattgccaacgcctacctgtttagaatagatattcaggatttcttctacagcatttcccgtaaccgagtcgccgctgccttgcatgaatgcggctttaggaaggctcgcacatatgctaaatggtcttgcgttagaaaccctgtgcctgggaaaccccgatacgctctgcccattggttttgtgcagagcccggcactggcttccctggtgttaatgcgaaccccaatcatgcgcgccatcgaacgcttcgcagcccgaggaatctacattagcgtttatcttgacgacattattggcagtggacccgatttagccgctgtcgaggatgcttaccgtaacattcttgcagcatgtgaacttgcagcattacccgtcaacccttctaagcttgtcgccccccagactgagattactgcctttaattgcgttgtgcgacacgggaacgcccgggtggcaccagaacgggtcgcagagttctttaatcagtcccccgttaccagtagtgtgacagcattcgaaagttattgccgttccgtagaggccaggaaccttacc

SEQ ID NO: 738 - DNA, 759 bp, synthetic construct
  source 1..759: mol_type = other DNA; note = MG160-56_cloned_into_spCas9(H840A)_tethered_plasmid
gaaacctggaagcataagtttcttctgaaagaaaagaagtgggttcacatccctagcgaggagatgatcaagtatggctctagtttgcacaagtatcttagaagaaactggagatttccgctgtattactatcacctgaggaacggagggcatgtggccgctgctaaacttcataaaagcaatgatttcttttgtctgattgacattaagtgctttttcgaatccaccagccagagcagagtcactcgcgagcttaagaaaatcatcccttacgacaaggccaggcacattgctaaactcagcaccgtgcgacttcccaatgctgtgagacataagtttgcagttccctatgggtacccacagtctcccgtgttagccaccttgtgccttcagaactctcatgccggcacagtcattgatagcttttataggtcaggcattgtgacagtttcagtgtatatggacgatataattctcagttccaaggatctcgccatactgaatcagcactttgagatcctttgcgaggccttgagaaaatctaggtatgagatcaacgtcagcaagacgcagaaaccagccactaaaatcagcgtgtttaatctcgagctggggcatcggcacttaaaggtggagtcaggtcgaatggtactgtttatccaggccttcgctaaaacccggaataagcacgagaaaaagagtatcgccaagtacgtgcatacggtaaaccccgatcaggcggagcgacacttcccaaag

SEQ ID NO: 739 - DNA, 768 bp, synthetic construct
  source 1..768: mol_type = other DNA; note = MG160-57_cloned_into_spCas9(H840A)_tethered_plasmid
tttggcacctacctccacaagttctcactccccaacggacaccaggtctttgtcccaagcgcctctgcccgccgcgatgggagcgtagtgcaagccgacattctgcagagatggcgagtgccacactatttctaccatctgcgtagcggcgggcatctggcggctgtaaaggcacaccttcacaatcgctgttttagcacccttgatataagcgggttttttgatagcgtgagccgatctaaaatctacagagccctcagatccattcggattcatcggcagaaagcttggaagattgctcaacagagcacagtcgaaaaggtgccaggaagtttcagtttgccctacggcttcgtgcagtcaccagtgctggcttccctggctttggacagatcagctctcggcagaagactggctgttctcgcacgaagtaatcacgttcaattgagctgctatgtagatgatgtagttcttagcggcgtagaggaatgcgctgtggaaagcgggaggttagccctcatagaagcagcacgcctgtcaaattttgtgatcaacaccgtgaagtcacagctgcctggccctcagattactgtattcaacatagtgctgagtaatggcgagatggcccttacgactgaccgtatgcatcagttcgaaaaggacctcattcaggcaaccgagcccgcaactgccgccattttcgcttatgtccgcagtgtaaatagtgcccagggaaaccatctgacaaatagattggctgtggccagc

SEQ ID NO: 740 - DNA, 765 bp, synthetic construct
  source 1..765: mol_type = other DNA; note = MG160-58_cloned_into_spCas9(H840A)_tethered_plasmid
aacactaagtggtctaccagatttgagcttaaaccgggaaaatgggtcttcgtgccaacacctgagatgattcaggttggaaaggaaatcaaatcagcaatcgaaatgagatggcggcctcctacgtatttctaccatctgcgtcccggtggacatgtggcggcattgaaagctcacctgggcaatgcggctttcctgagactggatatacaggatttttttggatctatcggaaggtcaagagtggcaagatgcctgaagacccgattcggtcatgactctgcgagagagtgggcacacgcctctactgtccgagatccctctggtgctgcccgctccattatcccctttgggtttgtgcagtctccaatagtggcctcattatgtctggccgagagtgcactgggaagacacttgaacactttgcatcgaagacgctctgtgaaagtgtccgtgtacgtagacgacattatcttatcaagtaaagatccagatgcagttggcgacgaattgctcgacgggctgaagaaggccggacataggagcaggctcttctttagtgccgagaagtcacaggggccaggaccaacgatcaaggcttttaatatcgagttgtgcagtaaatcaatgcgcattgaggacggcaggatggctgagtttatcgaagccctgaagtcttcagcacacccttttcaaagggctggcatcctgggctatatcgggagcgtcaatagtgaccaggccgtagaagctggccagttgggc

SEQ ID NO: 741 - DNA, 756 bp, synthetic construct
  source 1..756: mol_type = other DNA; note = MG160-59_cloned_into_spCas9(H840A)_tethered_plasmid
cccgccaaatggcttcatcggtttgagcggaaacccggaaggtgggtattcgagccaagcccagaagccagagctgatggcgttgaggtaaaagccctggttgaatcccgatggaaggcccccacgtattactttcatctgcgaaggggaggtcacgttgcagccttattgcgtcaccagcgcagcacattcttcgtgaaggtggacattgccgatttctttgggtcagtgagtcggtctcgggtcagccgagttctgaaagaattttttcctcacactgacgctagaaggatggcaacagcctccaccgtgcaacatcccgatgacgatgccagacaaatcctgccctacggcttcattcagtctcccctccttgctagtctcgcgttgcacaagtctgcactggggaaataccttgacgaattgcaccgcgagcgcagatttgtggtgaccgtgtatgtggacgatataatcatttctgggggtgatcatgtcgaactttgcttcgcactgagtgagttaaaaaccaaggcacaaagaagccggtttgtgttttcagatgacaaggagcaggggccagccgcctcaattagtgcttttaatatcggactggcaacaggatctcctctgtttatactgcccccaaagctggctgagttccgcgatgcctttcgcgcttcaccaagcgaactgcagcgcgcaggcatccaatcctacgttcgtagtgtgaaccacgctcaagccgatactctgcct

SEQ ID NO: 742 - DNA, 753 bp, synthetic construct
  source 1..753: mol_type = other DNA; note = MG160-60_cloned_into_spCas9(H840A)_tethered_plasmid
ataccatccgacaggtggctttatcggtttaagaggaaatccgggtggatttttgttcccaccccagatactctggtgtacggcaaagaaatcaaagccttgatcgagaaacgatggaaggctccaacctactactatcatttacgtcaaggcggccatgtggccgccttaaaacaccatagcagcaatgaatactttcttcacctggatataaaatccttttttggacatattaataccacccgtgtaacaagatgccttaagggcatgttgtcctatgtgaaggcacgcgagactgcaatccattccactgtgcaccatcccaaggccaagcacttgagcattttgccattcggcttcgtacagtcacctatcattgcctccgtctgcctgaggatgtccgctttgggcaactatcttcatgagctgcaccagcaggcgggcatggaggtgtcagtttacatggacgatattatcttgagtagtaacaaactggatgatctgaccgcagccctggaaaaggtggaatgggcttccgataggagcggctttccactgaacaagaaaaaacaggagggacccgataaaatggttaccgcctttaacatcgaactgagtagacataacttggacattagtgctgcacggctgacagagtttcaggagatctattatgcctctccaaaccctaatcagagggctggaatcctgaattatgttcagactattaacgcaagccaagctgcaaacttc

SEQ ID NO: 743 - DNA, 774 bp, synthetic construct
  source 1..774: mol_type = other DNA; note = MG160-61_cloned_into_spCas9(H840A)_tethered_plasmid
gaaccccgatggagctctaagtttgaaatcaagcccggtagttgggttttcgtgccgactgagacagaagtgctcttcggcacagagctcaaggcgtccattgaatccaaatggaagccaccagccttttattaccatctgcgagacggcggccacgtgaaagctcttcagtcacacgtgaaccatgaggcattcctgtatctcgacatctctaatttttttggttgtataaataggagtcgcgtgacccggtgccttaagggcatgtacagttatcagaactctcgggacattgcacaacgctcaactgtcaaaaaccctgacagctccttgaataaatacatcctcccttttggcttcgtgcagtcacctattattgcaagcctctgtctctccaaatctcgccttgggcggtttctgtctgcctccaacagacaaaggaacttcagtgtatctgtgtatatggacgatattattgtaagcgctgatgacaagaaagacctccagcaactgcttgatgagataatcccaattagcgagcagtcaaagtttttccttaataaggaaaaacaagaaggaccatcttctaagatcaccgcgtttaacattaaattaaccaactccgtgctctctgtaacatccgaaaggtttgaagagtttaagaaagcatataaagagactgaggacctgcatgtgcgacggggcatcgtcggctatgtggaaaccgttaacaaagagcaggctagtgagctgatgaaactctcttgtagttcc

SEQ ID NO: 744 - DNA, 732 bp, synthetic construct
  source 1..732: mol_type = other DNA; note = MG160-62_cloned_into_spCas9(H840A)_tethered_plasmid
gccgttcggtttagtacttttgattacaagtatcaaaaaaatgctaaatggtactttgccccgagcaaaaagggcgaggaaatcggaggtgatctcaaaaggcagatagaggcagctcatcggtttgacactacttattttcatcttcacaaagggggccacgtagccgctttacatgagcacagaagtcatagactgttttgtcgggttgacatcgaaaactttttttaccgcatagccaggaatcgcgttgcccgggcactccgcaatattggaattgcgcgagccgaacattacgctaaatggagtacagtgaaagatccatttggagagtttaattacgtgctcccttacggttttgtccagagtccaattctggctacccttgtcctggatcagagcggagtgggggattttatccgagctatcccgccagctatcggtcgcagtatttatatggacgacatagtactgtctggcgacgatgaggtgcagctccaacagtattttaagggattaactaacgagctggaaagaagtaactttagactcaatcctagtaaaattagagcacccgctaagaccatggatgtgtttaattgcgatcttgaaacaggccagtccgtggttcagacaaagaggaaggagaaattctttgccaaggctcggagtcctgcaagcattgaagccttcgaagagtactgcgagagagtcgaacatggaaactcaatc

SEQ ID NO: 745 - DNA, 744 bp, synthetic construct
  source 1..744: mol_type = other DNA; note = MG160-63_cloned_into_spCas9(H840A)_tethered_plasmid
gaacagaaatggcgcgatcggtttgaactcaagcccggaaggtgggtcttcgtgcccactcctgagtccgcagaacgtggagtggagataaaagccctggtagaagagcagtggaaaccaccggcctttttctaccatttgcgtcatggagggcatgtcgccgcaatcagagcgcacgttgagaataagtatttcttcagggctgacatagatgacttctttggtcgtgtaggccgaagcagagtaacgagatgtttaaaatcctattttagctatgctgaagccagagaaatgactaatgcctccgttgtgaagcatcctgcccatgggaaacacattctgccatacgggttcatccagagccctattctcgcctcagttgcccttgacatgtccaagctcggggcctgcctgagaggcctcgctaaaaagaaacaattgaaggtcagcgtatacgtggacgacataattatctcttcaaatgagttcgggctgctcaatacggctgctgatacagtcttgcatagggctgaacaagccctgttcccgattggcgctctcaaaagggaaggaccatgcgaagccatcacagcttttaacattgaactcagccagcattctctcaaaatatctaatcagaggatggatgcatttagggagcgatacctggaagctgactctgagtctgagaaggctggtatactcggttacatcgatgccgtgaatcctttgcagtatctgttc

SEQ ID NO: 746 - DNA, 765 bp, synthetic construct
  source 1..765: mol_type = other DNA; note = MG160-64_cloned_into_spCas9(H840A)_tethered_plasmid
cctctccccaagtggaattgcaagtttcagttgaaaaaggactgttgggtgttcgttcccactgaggatgccaagaaaagaggccagaagattaaggagcaaattgaatctttctggcagcctccaaggtattatttccatctccgcgatggcggccatgttaaagccctgagactccacgagtctaggaagcagtatctccatcttgatattaaggacttttttgggtgcgtcaatcggtcaaaagtcactagagccctgaagagtaggattggatatgatgccgcccgccagatagctaccaatagcaccgtaagggctccaaatgattcaggttatatattgccaagaggttttgttgaaagcccaatactcgccagcatttgtctcagaaatagccgtctcggagactatctccataagctccacgatagcgagcattatgagatcagcgtctatatggacgatataattgtctcagccgacagtgacatccttctgcaggaagctctgaccgagctggaatcaagagctaaccggtcaaaattccccttgaatacacagaagactcagggtccctgtaaacagatctcagcctttaacatcgagctctctccaggggagttgcgggtcaccacagagaggatggctaaatttttggacaattacaaaggcgcagaaagtgacgattgcagaaacggcatcctgaattacgtgaaatctgtgaaccctggtcaaagccaagcactgaaagaggaagactct

SEQ ID NO: 747 - DNA, 750 bp, synthetic construct
  source 1..750: mol_type = other DNA; note = MG160-65_cloned_into_spCas9(H840A)_tethered_plasmid
acacataagtggacctataggtatcagctgaaagcagaccggtgggtgttcgtgcccactaacgaggccaagggagtcggcgcatctattaagcgacttgtcgaggggaagtggaaagtgccagaatattactttcacctccggaagggtgggcatgtggccgccgtgcggtctcacagcgagaacacatatttctttcgggctgacctcgacgacttttttggacgggttaatcgcagcagagtcacccgatgcctcaaaagctggtttccatatatggaggctcgtgcaatggcttcagagtcagttgttaaacgccctagcaccgaggatttcatcctgccatatggattcgtccagagtcccatattagcttcactcgctctcgatatgtcaaaacttggaaggtttcttggaaaactccaccgccgctccgatgtaaccgttagcgtttacgtggacgacataatcgtctcctgtaatgacgaagcccagctgtttcagatagcagaccttttaaaccagaaggctgacgagagtaatttccccctttccctttctaaaaaggaaggcccagcccctgagatcaccgccttcaatattgagctgtcccacggcgttatgagaataacagaggagagattggccctgctgcgagccgaatacttaagcgcgacttccgaacattctaagaacggcatctacggctacgtggagagcgtcaatattgggcagatagagaatctcgtt

SEQ ID NO: 748 - DNA, 732 bp, synthetic construct
  source 1..732: mol_type = other DNA; note = MG160-66_cloned_into_spCas9(H840A)_tethered_plasmid
agtgtggccatccccaacttcgactacagttacctcaggaagggcaaaccggtatttgttccgactaaggttgggaggagaatcggccacgagatcaaagatgtggtcgaggatatttatgttttcgatcctatttacttccacctgcggagagggggccacgttgcagctatgcaccatcacagagacaatcattttttcgcccgtattgacatcagcaactttttctactcaatttcacgcagaagagtacagtccgccctggacagggctggagttggtaatgcccggttttatgcaaagtggagcacagtagtatcaccattcggggatccccggtacgctttaccatatgggttcgtgcagtccccaatcctggcatctctggttgtggcaactagtgacttggggaggcatctgctgaatctcccagcctctatcaaggtgggcgtgtatgtggatgacatcagcctctcaagtgatgatgaagccgagcttcatcaggcttatgacgacattcttgctgtgatcgcatctgatggtctggcagtgaacctcgccaaactgcgaccacctgctaatatcatcgatatttttaattgtgacctggcccacgggattgcatcagtcactgatgagagagtgaacgcctttcagtcttcaaacccaagcctggaagcagaaagcgcctttatagcttattgtgcttcagtggaaatgggaaaccagccc

SEQ ID NO: 749 - DNA, 738 bp, synthetic construct
  source 1..738: mol_type = other DNA; note = MG160-67_cloned_into_spCas9(H840A)_tethered_plasmid
tccgtgaaattcgagaatttctccttttcttacctgaacgatcatggtaaacgagtgttcgttccaaatgagaaaggatatactatcggataccatgtgaaatcacttgttgagagggctaccgcgatcgaaccattctatttccatctgttagatggaggccacgttgccgccctgcacgtgcaccggaaaaaccaatatttcgcaagagctgaccttaagaattttttttacagcatttctcggaatagggttgcaagggcactgcatgagataggggtgccgaaagctggctactacgccaaatgcagctgcgtgaaaaatccgtataacgtcccatcatactcacttccatacggctttgtacagtccccaatattagctacattggtgttatctcaaagtgtgctcggcgcctttttgcagaaaattcacgacgagatcaccgtatctgtgtatatggacgacattgctatcagcagtcccactctggaacctatgaaagaagcctttaaccagctcaaaataaaaattgaagaggcgaatttccagatcaacttggaaaagaccaagaatcccttagactttatgcaaatctttaattgtaacttggaaattaaccatgtgtccgtgactcagattaggaagaaactgtttgatgaaaagattcgctccgctgaaagccgggcatcctttgacatctactgcaagtccgtggagaggggaaacaatctgtct

SEQ ID NO: 750 - DNA, 1914 bp, synthetic construct
  source 1..1914: mol_type = other DNA; note = MG151-98_H171N_cloned_into_untethered_plasmid
gacaatattaagcaattatctgtgttgcctggactgtccgaggacccttccgcagtcggcttgcttcaggtgaaagagcagcaggtgcctattgcgactaaggcagttcatcgcagacagtataggacaaatcgggactcattattaccaattcacaaattgatccggcagctggaaagtcagggcgtcatcagcagaacccattcccccttcaacagccccatttggcctgtgaggaaggcctcaggcgaatggcgactgaccgtggactacagggggttgaatgaagtcacccctccgttaagtgcagccgtgccggatatgctggaattgcagtatgagctggaatccaaagcagctaaatggtatgctactatcgacatagccaatgcattcttttccatccctcttgccagggagtgtaggccccagttcgcctttacatggaggggcatccaatatacttggaatcgcctgcctcagggttggaagcatagtcccacaatctgcaacggcctcatccaaactgtgctcgagcaggggagcgcacctgagcacctgcagtacattgacgatattgtggtgtggggcgacaccgccgaggacgtgttcaagaaaggagagcaaattatacagatcttgctgcaggccggcttcgcaatcaaacgaagcaaggtgaaggggcccgctcaggagatccagttcttaggcattaaatggcaggacggccgccgccacatcccagcagatgtcatcgataagatcacagcaatgtcaccccccattaacaaaaaagaaacgcagtcttttctgggcgtagttggattttggaggatgcacgtcccaaactactcccttattgtgtcaccattgtatcaggtgactcgtaaaaaaaatgacttcacctggggacctgaacagcagcaggcatttgagcagattaaacatgaaatcgcccgggccgtagcactgggaccggtaaggacaggccaggatgtgaaaaacatcttatacacagctgctggcgaaaaaggtcctacatggagcctgtggcagcgtacttccggtgagactagggggcgccctctcgggttctggagccgggcttaccgggggtccgaggaatgctataccccaactgaaaaagaaatactcgcagcatatgaaggtgtgcgagcggcaagtgaagtggttggaactgagacccagctcttgctggcaccccgcctgccagtgctcaactggatgtttaaggggaaaataccctccacccaccacgcgaccgacgcaacctggtctaagtggattgcactcattacacaacgcgcccggatgggcaacttctccaggccgggcatattggaggtcataatggactggccggagggaaagaaattcgagacctcccctggcgaagaggtgtcacgagccaaagaagcgcccccttacaacgagttgcccggaaacgaaaagaagtatgcattgttcactgatggaagctgtcgcattgtgggcaaatatcggagatggaaagccgcagtatggagccctgtgcgccaggtagcagaagccacagagggaaagggggagagcagccaattcgcagaggtcaaagccgtccagcttgcactcgatgttgctgaaagggaaggctggccagtgctctatctgtataccgactcttggatggtagccaatgccctgtgggggtggttacaacagtgggaacaaaacaactggcagcggcgcggaaagccgatatggtcagccgaactttggaaggacatcgctgcccgcattaagaatatggtggtaaaagtgaggcacgtggacgcacatatgccgaaatcccgagccacggaggaacaaaagaacaaccatcatgtagaccaggccgctaagatagaagtagcc

SEQ ID NO: 751 - DNA, 1914 bp, synthetic construct
  source 1..1914: mol_type = other DNA; note = MG151-98_K297P_cloned_into_untethered_plasmid
gacaatattaagcaattatctgtgttgcctggactgtccgaggacccttccgcagtcggcttgcttcaggtgaaagagcagcaggtgcctattgcgactaaggcagttcatcgcagacagtataggacaaatcgggactcattattaccaattcacaaattgatccggcagctggaaagtcagggcgtcatcagcagaacccattcccccttcaacagccccatttggcctgtgaggaaggcctcaggcgaatggcgactgaccgtggactacagggggttgaatgaagtcacccctccgttaagtgcagccgtgccggatatgctggaattgcagtatgagctggaatccaaagcagctaaatggtatgctactatcgacatagccaatgcattcttttccatccctcttgccagggagtgtaggccccagttcgcctttacatggaggggcatccaatatacttggaatcgcctgcctcagggttggaagcatagtcccacaatctgccacggcctcatccaaactgtgctcgagcaggggagcgcacctgagcacctgcagtacattgacgatattgtggtgtggggcgacaccgccgaggacgtgttcaagaaaggagagcaaattatacagatcttgctgcaggccggcttcgcaatcaaacgaagcaaggtgaaggggcccgctcaggagatccagttcttaggcattaaatggcaggacggccgccgccacatcccagcagatgtcatcgataagatcacagcaatgtcaccccccattaacaaaaaagaaacgcagtcttttctgggcgtagttggattttggaggatgcacgtcccaaactactcccttattgtgtcaccattgtatcaggtgactcgtcccaaaaatgacttcacctggggacctgaacagcagcaggcatttgagcagattaaacatgaaatcgcccgggccgtagcactgggaccggtaaggacaggccaggatgtgaaaaacatcttatacacagctgctggcgaaaaaggtcctacatggagcctgtggcagcgtacttccggtgagactagggggcgccctctcgggttctggagccgggcttaccgggggtccgaggaatgctataccccaactgaaaaagaaatactcgcagcatatgaaggtgtgcgagcggcaagtgaagtggttggaactgagacccagctcttgctggcaccccgcctgccagtgctcaactggatgtttaaggggaaaataccctccacccaccacgcgaccgacgcaacctggtctaagtggattgcactcattacacaacgcgcccggatgggcaacttctccaggccgggcatattggaggtcataatggactggccggagggaaagaaattcgagacctcccctggcgaagaggtgtcacgagccaaagaagcgcccccttacaacgagttgcccggaaacgaaaagaagtatgcattgttcactgatggaagctgtcgcattgtgggcaaatatcggagatggaaagccgcagtatggagccctgtgcgccaggtagcagaagccacagagggaaagggggagagcagccaattcgcagaggtcaaagccgtccagcttgcactcgatgttgctgaaagggaaggctggccagtgctctatctgtataccgactcttggatggtagccaatgccctgtgggggtggttacaacagtgggaacaaaacaactggcagcggcgcggaaagccgatatggtcagccgaactttggaaggacatcgctgcccgcattaagaatatggtggtaaaagtgaggcacgtggacgcacatatgccgaaatcccgagccacggaggaacaaaagaacaaccatcatgtagaccaggccgctaagatagaagtagcc

SEQ ID NO: 752 - DNA, 1914 bp, synthetic construct
  source 1..1914: mol_type = other DNA; note = MG151-98_H171N_K297P_cloned_into_untethered_plasmid
gacaatattaagcaattatctgtgttgcctggactgtccgaggacccttccgcagtcggcttgcttcaggtgaaagagcagcaggtgcctattgcgactaaggcagttcatcgcagacagtataggacaaatcgggactcattattaccaattcacaaattgatccggcagctggaaagtcagggcgtcatcagcagaacccattcccccttcaacagccccatttggcctgtgaggaaggcctcaggcgaatggcgactgaccgtggactacagggggttgaatgaagtcacccctccgttaagtgcagccgtgccggatatgctggaattgcagtatgagctggaatccaaagcagctaaatggtatgctactatcgacatagccaatgcattcttttccatccctcttgccagggagtgtaggccccagttcgcctttacatggaggggcatccaatatacttggaatcgcctgcctcagggttggaagcatagtcccacaatctgcaacggcctcatccaaactgtgctcgagcaggggagcgcacctgagcacctgcagtacattgacgatattgtggtgtggggcgacaccgccgaggacgtgttcaagaaaggagagcaaattatacagatcttgctgcaggccggcttcgcaatcaaacgaagcaaggtgaaggggcccgctcaggagatccagttcttaggcattaaatggcaggacggccgccgccacatcccagcagatgtcatcgataagatcacagcaatgtcaccccccattaacaaaaaagaaacgcagtcttttctgggcgtagttggattttggaggatgcacgtcccaaactactcccttattgtgtcaccattgtatcaggtgactcgtcccaaaaatgacttcacctggggacctgaacagcagcaggcatttgagcagattaaacatgaaatcgcccgggccgtagcactgggaccggtaaggacaggccaggatgtgaaaaacatcttatacacagctgctggcgaaaaaggtcctacatggagcctgtggcagcgtacttccggtgagactagggggcgccctctcgggttctggagccgggcttaccgggggtccgaggaatgctataccccaactgaaaaagaaatactcgcagcatatgaaggtgtgcgagcggcaagtgaagtggttggaactgagacccagctcttgctggcaccccgcctgccagtgctcaactggatgtttaaggggaaaataccctccacccaccacgcgaccgacgcaacctggtctaagtggattgcactcattacacaacgcgcccggatgggcaacttctccaggccgggcatattggaggtcataatggactggccggagggaaagaaattcgagacctcccctggcgaagaggtgtcacgagccaaagaagcgcccccttacaacgagttgcccggaaacgaaaagaagtatgcattgttcactgatggaagctgtcgcattgtgggcaaatatcggagatggaaagccgcagtatggagccctgtgcgccaggtagcagaagccacagagggaaagggggagagcagccaattcgcagaggtcaaagccgtccagcttgcactcgatgttgctgaaagggaaggctggccagtgctctatctgtataccgactcttggatggtagccaatgccctgtgggggtggttacaacagtgggaacaaaacaactggcagcggcgcggaaagccgatatggtcagccgaactttggaaggacatcgctgcccgcattaagaatatggtggtaaaagtgaggcacgtggacgcacatatgccgaaatcccgagccacggaggaacaaaagaacaaccatcatgtagaccaggccgctaagatagaagtagcc

SEQ ID NO: 753 - DNA, 1416 bp, synthetic construct
  source 1..1416: mol_type = other DNA; note = MG151-98_trim166AA_cloned_into_untethered_plasmid
gacaatattaagcaattatctgtgttgcctggactgtccgaggacccttccgcagtcggcttgcttcaggtgaaagagcagcaggtgcctattgcgactaaggcagttcatcgcagacagtataggacaaatcgggactcattattaccaattcacaaattgatccggcagctggaaagtcagggcgtcatcagcagaacccattcccccttcaacagccccatttggcctgtgaggaaggcctcaggcgaatggcgactgaccgtggactacagggggttgaatgaagtcacccctccgttaagtgcagccgtgccggatatgctggaattgcagtatgagctggaatccaaagcagctaaatggtatgctactatcgacatagccaatgcattcttttccatccctcttgccagggagtgtaggccccagttcgcctttacatggaggggcatccaatatacttggaatcgcctgcctcagggttggaagcatagtcccacaatctgccacggcctcatccaaactgtgctcgagcaggggagcgcacctgagcacctgcagtacattgacgatattgtggtgtggggcgacaccgccgaggacgtgttcaagaaaggagagcaaattatacagatcttgctgcaggccggcttcgcaatcaaacgaagcaaggtgaaggggcccgctcaggagatccagttcttaggcattaaatggcaggacggccgccgccacatcccagcagatgtcatcgataagatcacagcaatgtcaccccccattaacaaaaaagaaacgcagtcttttctgggcgtagttggattttggaggatgcacgtcccaaactactcccttattgtgtcaccattgtatcaggtgactcgtaaaaaaaatgacttcacctggggacctgaacagcagcaggcatttgagcagattaaacatgaaatcgcccgggccgtagcactgggaccggtaaggacaggccaggatgtgaaaaacatcttatacacagctgctggcgaaaaaggtcctacatggagcctgtggcagcgtacttccggtgagactagggggcgccctctcgggttctggagccgggcttaccgggggtccgaggaatgctataccccaactgaaaaagaaatactcgcagcatatgaaggtgtgcgagcggcaagtgaagtggttggaactgagacccagctcttgctggcaccccgcctgccagtgctcaactggatgtttaaggggaaaataccctccacccaccacgcgaccgacgcaacctggtctaagtggattgcactcattacacaacgcgcccggatgggcaacttctccaggccgggcatattggaggtcataatggactggccggagggaaagaaattcgagacctcccctggcgaa

SEQ ID NO: 754 - DNA, 1599 bp, synthetic construct
  source 1..1599: mol_type = other DNA; note = MG151-98_trim177AA_cloned_into_untethered_plasmid
gctagcgccaccatgtacccctatgatgtacctgattatgcttctggcggcagcagcggcggctcaagcggaagtgaaacacctggaacttccgaaagcgctacgcctgaatcttctggtggatcttctggcggatcttccgcatgcgacaatattaagcaattatctgtgttgcctggactgtccgaggacccttccgcagtcggcttgcttcaggtgaaagagcagcaggtgcctattgcgactaaggcagttcatcgcagacagtataggacaaatcgggactcattattaccaattcacaaattgatccggcagctggaaagtcagggcgtcatcagcagaacccattcccccttcaacagccccatttggcctgtgaggaaggcctcaggcgaatggcgactgaccgtggactacagggggttgaatgaagtcacccctccgttaagtgcagccgtgccggatatgctggaattgcagtatgagctggaatccaaagcagctaaatggtatgctactatcgacatagccaatgcattcttttccatccctcttgccagggagtgtaggccccagttcgcctttacatggaggggcatccaatatacttggaatcgcctgcctcagggttggaagcatagtcccacaatctgccacggcctcatccaaactgtgctcgagcaggggagcgcacctgagcacctgcagtacattgacgatattgtggtgtggggcgacaccgccgaggacgtgttcaagaaaggagagcaaattatacagatcttgctgcaggccggcttcgcaatcaaacgaagcaaggtgaaggggcccgctcaggagatccagttcttaggcattaaatggcaggacggccgccgccacatcccagcagatgtcatcgataagatcacagcaatgtcaccccccattaacaaaaaagaaacgcagtcttttctgggcgtagttggattttggaggatgcacgtcccaaactactcccttattgtgtcaccattgtatcaggtgactcgtaaaaaaaatgacttcacctggggacctgaacagcagcaggcatttgagcagattaaacatgaaatcgcccgggccgtagcactgggaccggtaaggacaggccaggatgtgaaaaacatcttatacacagctgctggcgaaaaaggtcctacatggagcctgtggcagcgtacttccggtgagactagggggcgccctctcgggttctggagccgggcttaccgggggtccgaggaatgctataccccaactgaaaaagaaatactcgcagcatatgaaggtgtgcgagcggcaagtgaagtggttggaactgagacccagctcttgctggcaccccgcctgccagtgctcaactggatgtttaaggggaaaataccctccacccaccacgcgaccgacgcaacctggtctaagtggattgcactcattacacaacgcgcccggatgggcaacttctccaggccgggcatattggaggtcataatggactggccggagcctaggcctaagaagaaaagaaaggtgggtggttctcctaagaaaaagagaaaggtctgagaattc

SEQ ID NO: 755 - DNA, 1914 bp, synthetic construct
  source 1..1914: mol_type = other DNA; note = MG151-98_V273K_cloned_into_untethered_plasmid
gacaatattaagcaattatctgtgttgcctggactgtccgaggacccttccgcagtcggcttgcttcaggtgaaagagcagcaggtgcctattgcgactaaggcagttcatcgcagacagtataggacaaatcgggactcattattaccaattcacaaattgatccggcagctggaaagtcagggcgtcatcagcagaacccattcccccttcaacagccccatttggcctgtgaggaaggcctcaggcgaatggcgactgaccgtggactacagggggttgaatgaagtcacccctccgttaagtgcagccgtgccggatatgctggaattgcagtatgagctggaatccaaagcagctaaatggtatgctactatcgacatagccaatgcattcttttccatccctcttgccagggagtgtaggccccagttcgcctttacatggaggggcatccaatatacttggaatcgcctgcctcagggttggaagcatagtcccacaatctgccacggcctcatccaaactgtgctcgagcaggggagcgcacctgagcacctgcagtacattgacgatattgtggtgtggggcgacaccgccgaggacgtgttcaagaaaggagagcaaattatacagatcttgctgcaggccggcttcgcaatcaaacgaagcaaggtgaaggggcccgctcaggagatccagttcttaggcattaaatggcaggacggccgccgccacatcccagcagatgtcatcgataagatcacagcaatgtcaccccccattaacaaaaaagaaacgcagtcttttctgggcaaggttggattttggaggatgcacgtcccaaactactcccttattgtgtcaccattgtatcaggtgactcgtaaaaaaaatgacttcacctggggacctgaacagcagcaggcatttgagcagattaaacatgaaatcgcccgggccgtagcactgggaccggtaaggacaggccaggatgtgaaaaacatcttatacacagctgctggcgaaaaaggtcctacatggagcctgtggcagcgtacttccggtgagactagggggcgccctctcgggttctggagccgggcttaccgggggtccgaggaatgctataccccaactgaaaaagaaatactcgcagcatatgaaggtgtgcgagcggcaagtgaagtggttggaactgagacccagctcttgctggcaccccgcctgccagtgctcaactggatgtttaaggggaaaataccctccacccaccacgcgaccgacgcaacctggtctaagtggattgcactcattacacaacgcgcccggatgggcaacttctccaggccgggcatattggaggtcataatggactggccggagggaaagaaattcgagacctcccctggcgaagaggtgtcacgagccaaagaagcgcccccttacaacgagttgcccggaaacgaaaagaagtatgcattgttcactgatggaagctgtcgcattgtgggcaaatatcggagatggaaagccgcagtatggagccctgtgcgccaggtagcagaagccacagagggaaagggggagagcagccaattcgcagaggtcaaagccgtccagcttgcactcgatgttgctgaaagggaaggctggccagtgctctatctgtataccgactcttggatggtagccaatgccctgtgggggtggttacaacagtgggaacaaaacaactggcagcggcgcggaaagccgatatggtcagccgaactttggaaggacatcgctgcccgcattaagaatatggtggtaaaagtgaggcacgtggacgcacatatgccgaaatcccgagccacggaggaacaaaagaacaaccatcatgtagaccaggccgctaagatagaagtagcc

SEQ ID NO: 756 - DNA, 1914 bp, synthetic construct
  source 1..1914: mol_type = other DNA; note = MG151-98_S561K_cloned_into_untethered_plasmid
gacaatattaagcaattatctgtgttgcctggactgtccgaggacccttccgcagtcggcttgcttcaggtgaaagagcagcaggtgcctattgcgactaaggcagttcatcgcagacagtataggacaaatcgggactcattattaccaattcacaaattgatccggcagctggaaagtcagggcgtcatcagcagaacccattcccccttcaacagccccatttggcctgtgaggaaggcctcaggcgaatggcgactgaccgtggactacagggggttgaatgaagtcacccctccgttaagtgcagccgtgccggatatgctggaattgcagtatgagctggaatccaaagcagctaaatggtatgctactatcgacatagccaatgcattcttttccatccctcttgccagggagtgtaggccccagttcgcctttacatggaggggcatccaatatacttggaatcgcctgcctcagggttggaagcatagtcccacaatctgccacggcctcatccaaactgtgctcgagcaggggagcgcacctgagcacctgcagtacattgacgatattgtggtgtggggcgacaccgccgaggacgtgttcaagaaaggagagcaaattatacagatcttgctgcaggccggcttcgcaatcaaacgaagcaaggtgaaggggcccgctcaggagatccagttcttaggcattaaatggcaggacggccgccgccacatcccagcagatgtcatcgataagatcacagcaatgtcaccccccattaacaaaaaagaaacgcagtcttttctgggcgtagttggattttggaggatgcacgtcccaaactactcccttattgtgtcaccattgtatcaggtgactcgtaaaaaaaatgacttcacctggggacctgaacagcagcaggcatttgagcagattaaacatgaaatcgcccgggccgtagcactgggaccggtaaggacaggccaggatgtgaaaaacatcttatacacagctgctggcgaaaaaggtcctacatggagcctgtggcagcgtacttccggtgagactagggggcgccctctcgggttctggagccgggcttaccgggggtccgaggaatgctataccccaactgaaaaagaaatactcgcagcatatgaaggtgtgcgagcggcaagtgaagtggttggaactgagacccagctcttgctggcaccccgcctgccagtgctcaactggatgtttaaggggaaaataccctccacccaccacgcgaccgacgcaacctggtctaagtggattgcactcattacacaacgcgcccggatgggcaacttctccaggccgggcatattggaggtcataatggactggccggagggaaagaaattcgagacctcccctggcgaagaggtgtcacgagccaaagaagcgcccccttacaacgagttgcccggaaacgaaaagaagtatgcattgttcactgatggaagctgtcgcattgtgggcaaatatcggagatggaaagccgcagtatggagccctgtgcgccaggtagcagaagccacagagggaaagggggagagcagccaattcgcagaggtcaaagccgtccagcttgcactcgatgttgctgaaagggaaggctggccagtgctctatctgtataccgacaagtggatggtagccaatgccctgtgggggtggttacaacagtgggaacaaaacaactggcagcggcgcggaaagccgatatggtcagccgaactttggaaggacatcgctgcccgcattaagaatatggtggtaaaagtgaggcacgtggacgcacatatgccgaaatcccgagccacggaggaacaaaagaacaaccatcatgtagaccaggccgctaagatagaagtagcc

SEQ ID NO: 757 - DNA, 1914 bp, synthetic construct
  source 1..1914: mol_type = other DNA; note = MG151-98_D46K_cloned_into_untethered_plasmid
gacaatattaagcaattatctgtgttgcctggactgtccgaggacccttccgcagtcggcttgcttcaggtgaaagagcagcaggtgcctattgcgactaaggcagttcatcgcagacagtataggacaaatcggaagtcattattaccaattcacaaattgatccggcagctggaaagtcagggcgtcatcagcagaacccattcccccttcaacagccccatttggcctgtgaggaaggcctcaggcgaatggcgactgaccgtggactacagggggttgaatgaagtcacccctccgttaagtgcagccgtgccggatatgctggaattgcagtatgagctggaatccaaagcagctaaatggtatgctactatcgacatagccaatgcattcttttccatccctcttgccagggagtgtaggccccagttcgcctttacatggaggggcatccaatatacttggaatcgcctgcctcagggttggaagcatagtcccacaatctgccacggcctcatccaaactgtgctcgagcaggggagcgcacctgagcacctgcagtacattgacgatattgtggtgtggggcgacaccgccgaggacgtgttcaagaaaggagagcaaattatacagatcttgctgcaggccggcttcgcaatcaaacgaagcaaggtgaaggggcccgctcaggagatccagttcttaggcattaaatggcaggacggccgccgccacatcccagcagatgtcatcgataagatcacagcaatgtcaccccccattaacaaaaaagaaacgcagtcttttctgggcgtagttggattttggaggatgcacgtcccaaactactcccttattgtgtcaccattgtatcaggtgactcgtaaaaaaaatgacttcacctggggacctgaacagcagcaggcatttgagcagattaaacatgaaatcgcccgggccgtagcactgggaccggtaaggacaggccaggatgtgaaaaacatcttatacacagctgctggcgaaaaaggtcctacatggagcctgtggcagcgtacttccggtgagactagggggcgccctctcgggttctggagccgggcttaccgggggtccgaggaatgctataccccaactgaaaaagaaatactcgcagcatatgaaggtgtgcgagcggcaagtgaagtggttggaactgagacccagctcttgctggcaccccgcctgccagtgctcaactggatgtttaaggggaaaataccctccacccaccacgcgaccgacgcaacctggtctaagtggattgcactcattacacaacgcgcccggatgggcaacttctccaggccgggcatattggaggtcataatggactggccggagggaaagaaattcgagacctcccctggcgaagaggtgtcacgagccaaagaagcgcccccttacaacgagttgcccggaaacgaaaagaagtatgcattgttcactgatggaagctgtcgcattgtgggcaaatatcggagatggaaagccgcagtatggagccctgtgcgccaggtagcagaagccacagagggaaagggggagagcagccaattcgcagaggtcaaagccgtccagcttgcactcgatgttgctgaaagggaaggctggccagtgctctatctgtataccgactcttggatggtagccaatgccctgtgggggtggttacaacagtgggaacaaaacaactggcagcggcgcggaaagccgatatggtcagccgaactttggaaggacatcgctgcccgcattaagaatatggtggtaaaagtgaggcacgtggacgcacatatgccgaaatcccgagccacggaggaacaaaagaacaaccatcatgtagaccaggccgctaagatagaagtagcc

SEQ ID NO: 758 - DNA, 2127 bp, synthetic construct
  source 1..2127: mol_type = other DNA; note = MG151-98_all_mutations_cloned_into_untethered_plasmid
gctagcgccaccatgtacccctatgatgtacctgattatgcttctggcggcagcagcggcggctcaagcggaagtgaaacacctggaacttccgaaagcgctacgcctgaatcttctggtggatcttctggcggatcttccgcatgcgacaatattaagcaattatctgtgttgcctggactgtccgaggacccttccgcagtcggcttgcttcaggtgaaagagcagcaggtgcctattgcgactaaggcagttcatcgcagacagtataggacaaatcggaagtcattattaccaattcacaaattgatccggcagctggaaagtcagggcgtcatcagcagaacccattcccccttcaacagccccatttggcctgtgaggaaggcctcaggcgaatggcgactgaccgtggactacagggggttgaatgaagtcacccctccgttaagtgcagccgtgccggatatgctggaattgcagtatgagctggaatccaaagcagctaaatggtatgctactatcgacatagccaatgcattcttttccatccctcttgccagggagtgtaggccccagttcgcctttacatggaggggcatccaatatacttggaatcgcctgcctcagggttggaagcatagtcccacaatctgcaacggcctcatccaaactgtgctcgagcaggggagcgcacctgagcacctgcagtacattgacgatattgtggtgtggggcgacaccgccgaggacgtgttcaagaaaggagagcaaattatacagatcttgctgcaggccggcttcgcaatcaaacgaagcaaggtgaaggggcccgctcaggagatccagttcttaggcattaaatggcaggacggccgccgccacatcccagcagatgtcatcgataagatcacagcaatgtcaccccccattaacaaaaaagaaacgcagtcttttctgggcaaggttggattttggaggatgttcgtcccaaactactcccttattgtgtcaccattgtatcaggtgactcgtcccaaaaatgacttcacctggggacctgaacagcagcaggcatttgagcagattaaacatgaaatcgcccgggccgtagcactgggaccggtaaggacaggccaggatgtgaaaaacatcttatacacagctgctggcgaaaaaggtcctacatggagcctgtggcagcgtacttccggtgagactagggggcgccctctcgggttctggagccgggcttaccgggggtccgaggaatgctataccccaactgaaaaagaaatactcgcagcatatgaaggtgtgcgagcggcaagtgaagtggttggaactgagacccagctcttgctggcaccccgcctgccagtgctcaactggatgtttaaggggaaaataccctccacccaccacgcgaccgacgcaacctggtctaagtggattgcactcattacacaacgcgcccggatgggcaacttctccaggccgggcatattggaggtcataatggactggccggagggaaagaaattcgagacctcccctggcgaagaggtgtcacgagccaaagaagcgcccccttacaacgagttgcccggaaacgaaaagaagtatgcattgttcactgatggaagctgtcgcattgtgggcaaatatcggagatggaaagccgcagtatggagccctgtgcgccaggtagcagaagccacagagggaaagggggagagcagccaattcgcagaggtcaaagccgtccagcttgcactcgatgttgctaagagggaaggctggccagtgctctatctgtataccgacaagtggatggtagccaatgccctgtgggggtggttacaacagtgggaacaaaacaactggcagcggcgcggaaagccgatatggtcagccgaactttggaaggacatcgctgcccgcattaagaatatggtggtaaaagtgaggcacgtggacgcacatatgccgaaatcccgagccacggaggaacaaaagaacaaccatcatgtagaccaggccgctaagatagaagtagcccctaggcctaagaagaaaagaaaggtgggtggttctcctaagaaaaagagaaaggtctgagaattc

SEQ ID NO: 759 - DNA, 1599 bp, synthetic construct
  source 1..1599: mol_type = other DNA; note MG151-98_all_mutations_trimmed_177AA_cloned_into_untethered _plasmid
gctagcgccaccatgtacccctatgatgtacctgattatgcttctggcggcagcagcggcggctcaagcggaagtgaaacacctggaacttccgaaagcgctacgcctgaatcttctggtggatcttctggcggatcttccgcatgcgacaatattaagcaattatctgtgttgcctggactgtccgaggacccttccgcagtcggcttgcttcaggtgaaagagcagcaggtgcctattgcgactaaggcagttcatcgcagacagtataggacaaatcggaagtcattattaccaattcacaaattgatccggcagctggaaagtcagggcgtcatcagcagaacccattcccccttcaacagccccatttggcctgtgaggaaggcctcaggcgaatggcgactgaccgtggactacagggggttgaatgaagtcacccctccgttaagtgcagccgtgccggatatgctggaattgcagtatgagctggaatccaaagcagctaaatggtatgctactatcgacatagccaatgcattcttttccatccctcttgccagggagtgtaggccccagttcgcctttacatggaggggcatccaatatacttggaatcgcctgcctcagggttggaagcatagtcccacaatctgcaacggcctcatccaaactgtgctcgagcaggggagcgcacctgagcacctgcagtacattgacgatattgtggtgtggggcgacaccgccgaggacgtgttcaagaaaggagagcaaattatacagatcttgctgcaggccggcttcgcaatcaaacgaagcaaggtgaaggggcccgctcaggagatccagttcttaggcattaaatggcaggacggccgccgccacatcccagcagatgtcatcgataagatcacagcaatgtcaccccccattaacaaaaaagaaacgcagtcttttctgggcaaggttggattttggaggatgttcgtcccaaactactcccttattgtgtcaccattgtatcaggtgactcgtcccaaaaatgacttcacctggggacctgaacagcagcaggcatttgagcagattaaacatgaaatcgcccgggccgtagcactgggaccggtaaggacaggccaggatgtgaaaaacatcttatacacagctgctggcgaaaaaggtcctacatggagcctgtggcagcgtacttccggtgagactagggggcgccctctcgggttctggagccgggcttaccgggggtccgaggaatgctataccccaactgaaaaagaaatactcgcagcatatgaaggtgtgcgagcggcaagtgaagtggttggaactgagacccagctcttgctggcaccccgcctgccagtgctcaactggatgtttaaggggaaaataccctccacccaccacgcgaccgacgcaacctggtctaagtggattgcactcattacacaacgcgcccggatgggcaacttctccaggccgggcatattggaggtcataatggactggccggagcctaggcctaagaagaaaagaaaggtgggtggttctcctaagaaaaagagaaaggtctgagaattc

SEQ ID NO: 760 - DNA, 1842 bp, synthetic construct
  source 1..1842: mol_type = other DNA; note = MG151-99_I264K_cloned_into_untethered_plasmid
cgtgccgtgcaggcaattattcgaggacatgccgagatagagcctatatgcctgcctcagccgcgcaggattaccaacacgaagcagtatcggctgcctgggggacagcaggagataacaaagactgtgcaagagctggagcgcgtcggaattattagacccgctcatagtccatataacagcccaatttggcccgtacgtaagcctgatggaacttggcggatgactgttgactatcgcgaactcaataaagtgactccaccaattcacgcagccgtgcctaatatcgcaagcctcatggatacactgagccgagaaatcgagacttatcactgtgtgctggacctggcaaatgcctttttctccatcccgatcgccaaggagtctcaagaccagtttgcctttacctgggaaggaagacagtggaccttccaggtccttccacagggctacgttcacagtccgacattttgccacaacttggtcgcctccgatttggctaactggaataagcccagtacagttaagatgtttcattacatagacgaccttatgcttacaagcgattccatcgaggctcttgagaagacagttccctcactgatcacttacttgcaggaaaaagggtgggcaattaatccccagaaggtccaaggacccggtctgagcgttaagttcctgggtgttgtgtggagtggcaagacaaaagtgctccccagcgccatcatcgacaaaattcaggcattccccgtcccaacgaagccaaaacagctccaggagtttctgggtaagctcggctattggaggtcttttattccccacctcgcacagcttcttaaacccttgtatcggctcactaagaaaggccaggtgtgggattggggacgcacagagcaagaggccttccagcaagccaagattgctgtgaagcaagctcaggcacttgggatctttgaccccacactcccagccgagctggatgtgcatgtaacacaggagggcttcgggtggggcctctggcagcggcaaggttccgtgcgaatccctatcggcttctggtctcaaatctggcatggggccgaggagcgctactccatggtcgaaaagcagctgctcgccacatactcagccctccaggctgtggagcccattacacagactgctgaagtaattgttaaaactacacttcctatccagggttgggtgaaagacttgacacacattcctaagaccggcgttgctcagagccaaaccgtggcaaggtgggtagcatatctctctcaacgttcccgcctcagttccagccctctgaaggaagagctccagaagattttgggacctgtaacataccatagcgagactccagaggagatcgtcgtgacctgcccagaaaagtcacctgttcaggaaggcaaataccccattcctgaggatgcttggtacactgacggaagttctcgggggaatcccagcagatggagggcagtggcttatcacccatccactgagacaatttggtttgaagaaggggacggacagtcatctcagtgggccgagctgcgagccgtatggatggtgatcacacaggagccagggaactctgctcttaacatttgtactgactcatgggcagtttacagggggctgaccctctggatcgcacagtgggctacacaggattggactatccatgcaaggcctatttggggtaaggacatgtgggtggacatctggaacgtagtccgccataggacggtgagggcttatcacgtgagcggacaccaacctctgcagagccctggcaatgatgaggccgacaccctggccagggtcaggtggctg

SEQ ID NO: 761 - DNA, 1842 bp, synthetic construct
  source 1..1842: mol_type = other DNA; note = MG151-99_L551K_cloned_into_untethered_plasmid
cgtgccgtgcaggcaattattcgaggacatgccgagatagagcctatatgcctgcctcagccgcgcaggattaccaacacgaagcagtatcggctgcctgggggacagcaggagataacaaagactgtgcaagagctggagcgcgtcggaattattagacccgctcatagtccatataacagcccaatttggcccgtacgtaagcctgatggaacttggcggatgactgttgactatcgcgaactcaataaagtgactccaccaattcacgcagccgtgcctaatatcgcaagcctcatggatacactgagccgagaaatcgagacttatcactgtgtgctggacctggcaaatgcctttttctccatcccgatcgccaaggagtctcaagaccagtttgcctttacctgggaaggaagacagtggaccttccaggtccttccacagggctacgttcacagtccgacattttgccacaacttggtcgcctccgatttggctaactggaataagcccagtacagttaagatgtttcattacatagacgaccttatgcttacaagcgattccatcgaggctcttgagaagacagttccctcactgatcacttacttgcaggaaaaagggtgggcaattaatccccagaaggtccaaggacccggtctgagcgttaagttcctgggtgttgtgtggagtggcaagacaaaagtgctccccagcgccatcatcgacaaaattcaggcattccccgtcccaacgaagccaaaacagctccaggagtttctgggtatcctcggctattggaggtcttttattccccacctcgcacagcttcttaaacccttgtatcggctcactaagaaaggccaggtgtgggattggggacgcacagagcaagaggccttccagcaagccaagattgctgtgaagcaagctcaggcacttgggatctttgaccccacactcccagccgagctggatgtgcatgtaacacaggagggcttcgggtggggcctctggcagcggcaaggttccgtgcgaatccctatcggcttctggtctcaaatctggcatggggccgaggagcgctactccatggtcgaaaagcagctgctcgccacatactcagccctccaggctgtggagcccattacacagactgctgaagtaattgttaaaactacacttcctatccagggttgggtgaaagacttgacacacattcctaagaccggcgttgctcagagccaaaccgtggcaaggtgggtagcatatctctctcaacgttcccgcctcagttccagccctctgaaggaagagctccagaagattttgggacctgtaacataccatagcgagactccagaggagatcgtcgtgacctgcccagaaaagtcacctgttcaggaaggcaaataccccattcctgaggatgcttggtacactgacggaagttctcgggggaatcccagcagatggagggcagtggcttatcacccatccactgagacaatttggtttgaagaaggggacggacagtcatctcagtgggccgagctgcgagccgtatggatggtgatcacacaggagccagggaactctgctcttaacatttgtactgactcatgggcagtttacagggggctgaccaagtggatcgcacagtgggctacacaggattggactatccatgcaaggcctatttggggtaaggacatgtgggtggacatctggaacgtagtccgccataggacggtgagggcttatcacgtgagcggacaccaacctctgcagagccctggcaatgatgaggccgacaccctggccagggtcaggtggctg

SEQ ID NO: 762 - DNA, 1842 bp, synthetic construct
  source 1..1842: mol_type = other DNA; note = MG151-99_R556K_cloned_into_untethered_plasmid
cgtgccgtgcaggcaattattcgaggacatgccgagatagagcctatatgcctgcctcagccgcgcaggattaccaacacgaagcagtatcggctgcctgggggacagcaggagataacaaagactgtgcaagagctggagcgcgtcggaattattagacccgctcatagtccatataacagcccaatttggcccgtacgtaagcctgatggaacttggcggatgactgttgactatcgcgaactcaataaagtgactccaccaattcacgcagccgtgcctaatatcgcaagcctcatggatacactgagccgagaaatcgagacttatcactgtgtgctggacctggcaaatgcctttttctccatcccgatcgccaaggagtctcaagaccagtttgcctttacctgggaaggaagacagtggaccttccaggtccttccacagggctacgttcacagtccgacattttgccacaacttggtcgcctccgatttggctaactggaataagcccagtacagttaagatgtttcattacatagacgaccttatgcttacaagcgattccatcgaggctcttgagaagacagttccctcactgatcacttacttgcaggaaaaagggtgggcaattaatccccagaaggtccaaggacccggtctgagcgttaagttcctgggtgttgtgtggagtggcaagacaaaagtgctccccagcgccatcatcgacaaaattcaggcattccccgtcccaacgaagccaaaacagctccaggagtttctgggtatcctcggctattggaggtcttttattccccacctcgcacagcttcttaaacccttgtatcggctcactaagaaaggccaggtgtgggattggggacgcacagagcaagaggccttccagcaagccaagattgctgtgaagcaagctcaggcacttgggatctttgaccccacactcccagccgagctggatgtgcatgtaacacaggagggcttcgggtggggcctctggcagcggcaaggttccgtgcgaatccctatcggcttctggtctcaaatctggcatggggccgaggagcgctactccatggtcgaaaagcagctgctcgccacatactcagccctccaggctgtggagcccattacacagactgctgaagtaattgttaaaactacacttcctatccagggttgggtgaaagacttgacacacattcctaagaccggcgttgctcagagccaaaccgtggcaaggtgggtagcatatctctctcaacgttcccgcctcagttccagccctctgaaggaagagctccagaagattttgggacctgtaacataccatagcgagactccagaggagatcgtcgtgacctgcccagaaaagtcacctgttcaggaaggcaaataccccattcctgaggatgcttggtacactgacggaagttctcgggggaatcccagcagatggagggcagtggcttatcacccatccactgagacaatttggtttgaagaaggggacggacagtcatctcagtgggccgagctgcgagccgtatggatggtgatcacacaggagccagggaactctgctcttaacatttgtactgactcatgggcagtttacagggggctgaccctctggatcgcacagtgggctacacaggattggactatccatgcaaagcctatttggggtaaggacatgtgggtggacatctggaacgtagtccgccataggacggtgagggcttatcacgtgagcggacaccaacctctgcagagccctggcaatgatgaggccgacaccctggccagggtcaggtggctg

SEQ ID NO: 763 - DNA, 1842 bp, synthetic construct
  source 1..1842: mol_type = other DNA; note = MG151-99_G34K_cloned_into_untethered_plasmid
cgtgccgtgcaggcaattattcgaggacatgccgagatagagcctatatgcctgcctcagccgcgcaggattaccaacacgaagcagtatcggctgcctaagggacagcaggagataacaaagactgtgcaagagctggagcgcgtcggaattattagacccgctcatagtccatataacagcccaatttggcccgtacgtaagcctgatggaacttggcggatgactgttgactatcgcgaactcaataaagtgactccaccaattcacgcagccgtgcctaatatcgcaagcctcatggatacactgagccgagaaatcgagacttatcactgtgtgctggacctggcaaatgcctttttctccatcccgatcgccaaggagtctcaagaccagtttgcctttacctgggaaggaagacagtggaccttccaggtccttccacagggctacgttcacagtccgacattttgccacaacttggtcgcctccgatttggctaactggaataagcccagtacagttaagatgtttcattacatagacgaccttatgcttacaagcgattccatcgaggctcttgagaagacagttccctcactgatcacttacttgcaggaaaaagggtgggcaattaatccccagaaggtccaaggacccggtctgagcgttaagttcctgggtgttgtgtggagtggcaagacaaaagtgctccccagcgccatcatcgacaaaattcaggcattccccgtcccaacgaagccaaaacagctccaggagtttctgggtatcctcggctattggaggtcttttattccccacctcgcacagcttcttaaacccttgtatcggctcactaagaaaggccaggtgtgggattggggacgcacagagcaagaggccttccagcaagccaagattgctgtgaagcaagctcaggcacttgggatctttgaccccacactcccagccgagctggatgtgcatgtaacacaggagggcttcgggtggggcctctggcagcggcaaggttccgtgcgaatccctatcggcttctggtctcaaatctggcatggggccgaggagcgctactccatggtcgaaaagcagctgctcgccacatactcagccctccaggctgtggagcccattacacagactgctgaagtaattgttaaaactacacttcctatccagggttgggtgaaagacttgacacacattcctaagaccggcgttgctcagagccaaaccgtggcaaggtgggtagcatatctctctcaacgttcccgcctcagttccagccctctgaaggaagagctccagaagattttgggacctgtaacataccatagcgagactccagaggagatcgtcgtgacctgcccagaaaagtcacctgttcaggaaggcaaataccccattcctgaggatgcttggtacactgacggaagttctcgggggaatcccagcagatggagggcagtggcttatcacccatccactgagacaatttggtttgaagaaggggacggacagtcatctcagtgggccgagctgcgagccgtatggatggtgatcacacaggagccagggaactctgctcttaacatttgtactgactcatgggcagtttacagggggctgaccctctggatcgcacagtgggctacacaggattggactatccatgcaaggcctatttggggtaaggacatgtgggtggacatctggaacgtagtccgccataggacggtgagggcttatcacgtgagcggacaccaacctctgcagagccctggcaatgatgaggccgacaccctggccagggtcaggtggctg

SEQ ID NO: 764 - DNA, 1842 bp, synthetic construct
  source 1..1842: mol_type = other DNA; note = MG151-99_Anzalone_mut_cloned_into_untethered_plasmid
cgtgccgtgcaggcaattattcgaggacatgccgagatagagcctatatgcctgcctcagccgcgcaggattaccaacacgaagcagtatcggctgcctgggggacagcaggagataacaaagactgtgcaagagctggagcgcgtcggaattattagacccgctcatagtccatataacagcccaatttggcccgtacgtaagcctgatggaacttggcggatgactgttgactatcgcgaactcaataaagtgactccaccaattcacgcagccgtgcctaatatcgcaagcctcatggatacactgagccgagaaatcgagacttatcactgtgtgctggacctggcaaatgcctttttctccatcccgatcgccaaggagtctcaagaccagtttgcctttacctgggaaggaagacagtggaccttccaggtccttccacagggctacgttcacagtccgacattttgcaacaacttggtcgcctccgatttggctaactggaataagcccagtacagttaagatgtttcattacatagacgaccttatgcttacaagcgattccatcgaggctcttgagaagacagttccctcactgatcacttacttgcaggaaaaagggtgggcaattaatccccagaaggtccaaggacccggtctgagcgttaagttcctgggtgttgtgtggagtggcaagacaaaagtgctccccagcgccatcatcgacaaaattcaggcattccccgtcccaacgaagccaaaacagctccaggagtttctgggtaagctcggctattggaggtcttttattccccacctcgcacagcttcttaaacccttgtatcggctcactaagcccggccaggtgtgggattggggacgcacagagcaagaggccttccagcaagccaagattgctgtgaagcaagctcaggcacttgggatctttgaccccacactcccagccgagctggatgtgcatgtaacacaggagggcttcgggtggggcctctggcagcggcaaggttccgtgcgaatccctatcggcttctggtctcaaatctggcatggggccgaggagcgctactccatggtcgaaaagcagctgctcgccacatactcagccctccaggctgtggagcccattacacagactgctgaagtaattgttaaaactacacttcctatccagggttgggtgaaagacttgacacacattcctaagaccggcgttgctcagagccaaaccgtggcaaggtgggtagcatatctctctcaacgttcccgcctcagttccagccctctgaaggaagagctccagaagattttgggacctgtaacataccatagcgagactccagaggagatcgtcgtgacctgcccagaaaagtcacctgttcaggaaggcaaataccccattcctgaggatgcttggtacactgacggaagttctcgggggaatcccagcagatggagggcagtggcttatcacccatccactgagacaatttggtttgaagaaggggacggacagtcatctcagtgggccgagctgcgagccgtatggatggtgatcacacaggagccagggaactctgctcttaacatttgtactgactcatgggcagtttacagggggctgaccctctggatcgcacagtgggctacacaggattggactatccatgcaaggcctatttggggtaaggacatgtgggtggacatctggaacgtagtccgccataggacggtgagggcttatcacgtgagcggacaccaaccttggcagagccctggcaatgatgaggccgacaccctggccagggtcaggtggctg

SEQ ID NO: 765 - DNA, 1386 bp, synthetic construct
  source 1..1386: mol_type = other DNA; note = MG151-99_trim136AA_cloned_into_untethered_plasmid
cgtgccgtgcaggcaattattcgaggacatgccgagatagagcctatatgcctgcctcagccgcgcaggattaccaacacgaagcagtatcggctgcctgggggacagcaggagataacaaagactgtgcaagagctggagcgcgtcggaattattagacccgctcatagtccatataacagcccaatttggcccgtacgtaagcctgatggaacttggcggatgactgttgactatcgcgaactcaataaagtgactccaccaattcacgcagccgtgcctaatatcgcaagcctcatggatacactgagccgagaaatcgagacttatcactgtgtgctggacctggcaaatgcctttttctccatcccgatcgccaaggagtctcaagaccagtttgcctttacctgggaaggaagacagtggaccttccaggtccttccacagggctacgttcacagtccgacattttgccacaacttggtcgcctccgatttggctaactggaataagcccagtacagttaagatgtttcattacatagacgaccttatgcttacaagcgattccatcgaggctcttgagaagacagttccctcactgatcacttacttgcaggaaaaagggtgggcaattaatccccagaaggtccaaggacccggtctgagcgttaagttcctgggtgttgtgtggagtggcaagacaaaagtgctccccagcgccatcatcgacaaaattcaggcattccccgtcccaacgaagccaaaacagctccaggagtttctgggtatcctcggctattggaggtcttttattccccacctcgcacagcttcttaaacccttgtatcggctcactaagaaaggccaggtgtgggattggggacgcacagagcaagaggccttccagcaagccaagattgctgtgaagcaagctcaggcacttgggatctttgaccccacactcccagccgagctggatgtgcatgtaacacaggagggcttcgggtggggcctctggcagcggcaaggttccgtgcgaatccctatcggcttctggtctcaaatctggcatggggccgaggagcgctactccatggtcgaaaagcagctgctcgccacatactcagccctccaggctgtggagcccattacacagactgctgaagtaattgttaaaactacacttcctatccagggttgggtgaaagacttgacacacattcctaagaccggcgttgctcagagccaaaccgtggcaaggtgggtagcatatctctctcaacgttcccgcctcagttccagccctctgaaggaagagctccagaagattttgggacctgtaacataccatagcgagactccagaggagatcgtcgtgacctgc

SEQ ID NO: 766 - DNA, 981 bp, synthetic construct
  source 1..981: mol_type = other DNA; note = MG151-99_trim152AA_cloned_into_untethered_plasmid
cgtgccgtgcaggcaattattcgaggacatgccgagatagagcctatatgcctgcctcagccgcgcaggattaccaacacgaagcagtatcggctgcctgggggacagcaggagataacaaagactgtgcaagagctggagcgcgtcggaattattagacccgctcatagtccatataacagcccaatttggcccgtacgtaagcctgatggaacttggcggatgactgttgactatcgcgaactcaataaagtgactccaccaattcacgcagccgtgcctaatatcgcaagcctcatggatacactgagccgagaaatcgagacttatcactgtgtgctggacctggcaaatgcctttttctccatcccgatcgccaaggagtctcaagaccagtttgcctttacctgggaaggaagacagtggaccttccaggtccttccacagggctacgttcacagtccgacattttgccacaacttggtcgcctccgatttggctaactggaataagcccagtacagttaagatgtttcattacatagacgaccttatgcttacaagcgattccatcgaggctcttgagaagacagttccctcactgatcacttacttgcaggaaaaagggtgggcaattaatccccagaaggtccaaggacccggtctgagcgttaagttcctgggtgttgtgtggagtggcaagacaaaagtgctccccagcgccatcatcgacaaaattcaggcattccccgtcccaacgaagccaaaacagctccaggagtttctgggtatcctcggctattggaggtcttttattccccacctcgcacagcttcttaaacccttgtatcggctcactaagaaaggccaggtgtgggattggggacgcacagagcaagaggccttccagcaagccaagattgctgtgaagcaagctcaggcacttgggatctttgaccccacactcccagccgagctggat

SEQ ID NO: 767 - protein, 677 aa, synthetic construct
  source 1..677: note = MG151-118 reverse transcriptase
TVTLEDEYRLHQEQKPPDQEIDSWLQRFPEAWAETGGLGLAKHRPAIFVEVKPGTDPVRVRQYPMPLRAREGITPHIRRLLDQGVLRACHSSWNTPLLPVHKPNSTDYRPVQDLREVNKRVMDIHPTVPNPYTLLSALHPEKQWYTVLDLKDAFFSLPLAPKSQGLFAFQWTDPERGINGQLTWTRLPQGFKNSPTLFDEALHEDLGEYRRQHPEITLLQYVDDLLIAARSPETCVQGTEDLLKTLGELGYRASATKAQICKSEVTYLGYLLKGGQRWLTKARKETVLRIPRPQSTRQVREFLGSAGFCRLWIPGFAELAKPLYQATKERQPFNWTEEAELAFQQIKTSLLSAPALGLPDVSKPFHLYVDESKGVAKAVLTQYLGPWQRPVAYLSKKLDSVAAGWPPCLQIIAATALMVRDADKLIMGQELRVITPHAIEGVLQQPPDRWMSNARLTHYQGLLLNPLRITFLPPTSLNPASLLPNPDLDAPSHECTEILAQVHGVREDLQDRLLPDTELIWFTDGSSYVHQGQRYAGAAVTSETEVIWAEPLPPGTSAQRAELIALTQALTLGAEKKLTVYTDSRYAFATAHIHGAIYRERGLLTAEGKEIKNKQEILALLTALWKPKKLAIVHCPRHQKPTTPIARGNFLADQTAKSIAKAPSQLLVLQLPDPGPQ

SEQ ID NO: 768 - protein, 619 aa, synthetic construct
  source 1..619: note = MG151-119 reverse transcriptase
SIRAVQAIIRGHAEIEPICLPQPRRITNTKQYRLPGGQQEITKTVQELERVGIIRPAHSPYNSPIWPVRKPDGTWRMTVDYRELNKVTPPIHAAVPNIASLMDTLSREIETYHCVLDLANAFFSIPIAKESQDQFAFTWEGRQWTFQVLPQGYVHSPTFCHNLVARDLANWNKPSTVKMFHYIDDLMLTSDSIEALEKTVPSLITYLQEKEWAINPQKVQGPGLSVKFLGVVWSGKTKVLPSAIIDKIQAFPVPTKPKQLQEFLGILGYWRSFIPHLAQLLKPLYRLTKKGQVWDWGRTEQEAFQQAKIAVKQAQALGIFDPTLPAELDVHVTQEGFGWGLWQRQGSVRIPIGFWSQIWHGAEERYSMVEKQLLATYSALQAVEPITQTAEVIVKTTLPIQGWVKDLTHIPKTGVAQSQTVARWVAYLSQRSRLSSSPLKEELQKILGPVTYHSETPEEIVVTCPEKSPVQEGKYPIPEDAWYTDGSSRGNPSRWRAVAYHPSTETIWFEEGDGQSSQWAELRAVWMVITQEPGNSALNICTDSWAVYRGLTLWIAQWATQDWTIHARPIWGKDMWVDIWNVVRHRTVRAYHVSGHQPLQSPGNDEADTLARVRWLGST

SEQ ID NO: 769 - protein, 650 aa, synthetic construct
  source 1..650: note = MG151-120 reverse transcriptase
GIAAVDTDNIKQLSVLPGLSEDPSAVGLLQVKEQQVPIATKAVHRRQYRTNRDSLLPIHKLIRQLESQGVISRTHSPFNSPIWPVRKASGEWRLMVDYRGLNEVTPPLSAAVPDMLELQYELESKAAKWYATIDIANAFFSIPLARECRPQFAFTWRGIQYTWNRLPQGWKHSPTICHGLIQTVLEQGSAPEHLQYIDDIVVWGDTAEDVFKKGEQIIQILLQAGFAIKRSKVKGPAQEIQFLGIKWQDGRRHIPADVIDKITAMSPPINKKETQSFLGVVGFWRMHVPNYSLIVSPLYQVTRKKNDFTWGPEQQQAFEQIKHEIARAVALGPVRTGQDVKNILYTAAGEKGPTWSLWQRTSGETRGRPLGFWSRAYRGSEECYTPTEKEILAAYEGVRAASEVVGTETQLLLAPRLPVLNWMFKGKIPSTHHATDATWSKWIALITQRARMGNFSRPGILEVIMDWPEGKKFETSPGEEVSRAKEAPPYNELPGNEKKYALFTDGSCRIVGKYRRWKAAVWSPVRQVAEATEGKGESSQFAEVKAVQLALDVAEREGWPVLYLYTDSWMVANALWGWLQQWEQNNWQRRGKPIWSAELWKDIAARIKNMVVKVRHVDAHMPKSRATEEQKNNHHVDQAAKIEVAQIDLD

SEQ ID NO: 770 - protein, 677 aa, synthetic construct
  source 1..677: note = MG151-121 reverse transcriptase
SLSLADEHRLFESQQEPGGDMTHWVKRFPTAWAETAGTGLAKHLPPVVIQLKASALPIRVKQYPMPEEARRGIAPHIHRLIKEGVLRPCQSAWNTPLLPVRKPGSGDYRPVQDLRKVNERTEDIHPTVPNPYTLLSHLPPSQVWYTTLDLKDAFFSIPLSEISQPLFAFEWQEDGGQSGQLTWTRLPQGFKNSPTLFNEALSQDLEPFRRSHPRVTLLQYVDDLLLAAETREECIKATEHLLTELGELGYRASAKKTHICKRSVTYLGYRIADGARWLTDAMKQTILAIPSPTSTRGVREFLGSAGFCRLWIPGFAEIARPLYEATKEAPDWSWGEREQQAFDQLKDALLQAPALALPDPTRPFTLFVDEKKGVAKGVLTQQLGPWKRPVAYFSKKLDAVAAGWPPCLRIIAAIAVLVREADKLTFGQALWVTAPHPVEGILKQPPGKWMTNARLTHYQGLLLDSPRITFTDPVILNPATLLPNPELQTPVHNCKEFLSEVTQVRADLKDTPLSGCKLNWYTDGSSFFQDGARRAGAAVVDQEGNTVWSSALPPGTSAQKAELIALAEALERAKGKRVNIYTDSRYAFGTIHVHGAIYRERGFRTAEGKHLKNLAEVQRLLMAVEKPKAVAVMYVPGHQSAKTPEAVGNNRADQEAKRVAMVSPPMETGQPSTVAAI

SEQ ID NO: 771 - protein, 681 aa, synthetic construct
  source 1..681: note = MG151-122 reverse transcriptase
TVSLHDEHRLHQISSPPMLDIDNWLKQYPQAWAETGGMGLAKHRPAVYIELKPGADPVRVRQYPVSLEARLGITPRIWRLLKEGILRPCQSAWNTPLLPVRKPHTNDYRPVQDLREVNKPVIDIHPTVPNPYTLLSSLAPTRTWYTVLDLKDAFFSLPLAPKGQDLFAFEWTDPEERIHGQLTWTRLPQGFKNSPTIFDEALHEDLGEFRTQHPDLTLLQYVDDLLMAVETQAACLRGTKSLLQMLGDLGYRASAKKAQICKTEVSYPGYKLKDGQRWLTEARKETVLKISTPQNARQVREFLGTAGFCRLWILGFAELARPLYEAAKESKKFQWTEATGMAFKRLKEALLSAPDLALLDLTKPFHLYIDENKGIAKGVLMQSLGPWKRPIAYLSKKLDSVAAGWPPCLRIIAAVAMLVKDANKLTWGQELYIITPHAIEGILQQPPDRWLSNARLTHYQGLLLNPARIVFQRPPPPATLNPATLLPAPDLDSPLHDCTEILAQVHGVREDLQDQPLPNAEVTWYTDGSSYIKDGIRYAGAAITTETETVWAEPLPAGTSAQRAELVALTKAPTLGKDKRLNVFTDSRYAFATAHVHGNIYRERRLLTAEGKTIQNKDEILALLKALWLPKQLAIIHCPGHQKPTTPVAKGNNLAHQVTREVALQVDCALMTTLPDPGPAS

SEQ ID NO: 772 - protein, 650 aa, synthetic construct
  source 1..650: note = MG151-123 reverse transcriptase
GIAAVDTDNIKQLSALPGLSEDPSVVGLLQVKEQQVPIATKTVHRRQYRTNRDSLLPIHKLIRQLEDQGVISKTHSPFNSPIWPVRKASGEWRLTVDYRGLNEVTPPLSAAVPDMLELQYELESKAAKWYATIDIANAFFSIPLAKECRPQFAFTWRGVQYTWNRLPQGWKHSPTICHGLIQTVLEQGSAPEHLQYIDDIVVWGDTAEEVFTKGERIIQILLCAGFAIKRSKVKGPAQEIQFLGIKWQDGRRHIPTDVIDKISAMSPPTNKKETQSFLGVVGFWRMHVPNYSLIVSPLYHVTRMKNEFTWGPEQQQAFEQIKQEIARAVALGPVRMGQGIKNILYTAAGEKGPTWSLWQRASGETRGRPLGFWSRAYRGSEEGYTPTEKEILAAYEGVRAASEVIGTETQLLLAPRLPVLNWMFKGKGSSSHHATDATWSKWIALITQRARMGNLNRPGILEVIMDWPEGKKFGTPPAEEISRAKEAPPYNELPENEKTYALFTDGSCCIVGKHRRWKAAVWSPTRQVAEATEGKGESSQFAEVKAVQLALDVAERERWPMLYVYTDSWMVANALWGWLQQWEQNNWQRKGKPIWAADLWKDIAARIKNMVIKVRHVDAHVPKNRATEEQQNNHQVDRAARIEVAQIDLD

SEQ ID NO: 773 - protein, 650 aa, synthetic construct
  source 1..650: note = MG151-124 reverse transcriptase
GIAAVDTEGVQQLSILPGLSEDPSAVGLLRVKEQQVPIATKTVHRRQYRTNRDSLLPIQKLIHQLENQGVISKTHSPFNSPIWPVRKASGEWRLTVDYRGLNEVTPPLSAAVPDMLELQYELESKAAKWYATIDIANAFFSIPLTKESRPQFAFTWRGIQYTWNRLPQGWKHSPTICHGLIQAALEQGGAPEHLQYIDDIIVWGNTAKEVFEKGEQIIQILLRAGFAIKRSKVKGPAQEIQFLGIKWQDGRRHIPTDVINKISAMSPPTNKKETQSFLGVVGFWRMHVPNYSLIVSPLYQVTRKKNDFMWGPEQQQAFEQIKQEIARAVALGPVRMEQDAKNILYTAAGEKGPTWSLWQRASGETRGRPLGFWSRAYRGSEECYTPTEKEILAAYEGVRAASEVIGTETQLLLAPRLPVLNWMFKGKGPSTHHATDATWSKWIALITQRARMGNLNRPGILEVIMDWPEGKKFGTPPAEEISRAKEAPPYNELPENEKTYALFTDGSCCIVGKHRRWKAAVWSPTRQVAEATEGKGESSQFAEVKAVQLALDVAERERWPMLYVYTDSWMVANALWGWLQQWEQNNWQRKGKPIWAADLWKDIAARIKNMVIKVRHVDAHVPKNRATEEQQNNHQVDRAARIEVAQIDLD

SEQ ID NO: 774 - protein, 652 aa, synthetic construct
  source 1..652: note = MG151-125 reverse transcriptase
GIAAVAVEGIKQLNTLPGLSENPSAVGLLKVEEQQVPTATSTVHRRQYRTNRDAVIPIHKMIRELESQGVVSKTHSPFNSPIWPVRKSDGEWRLTVDYRALNEVTPPLSAAVPDMLELQYELESKAARWYATIDIANAFFSIPLAAECRPQFAFTWRGVQYTWNRLPQGWKHSPTICHGLIQAALEKGEAPEHLQYIDDIIVWGNTAVEVFEKGEKIIQILLRAGFAIKKSKVKGPAQEIQFLGVKWQDGRRQIPTEVINKITAMSPPTSKKETQAFLGAIGFWRMHIPEYSQIVSPLYLVTRKKNDFHWGPEQQQAFAQIKQEIAHAVALGPVRTGPEVKNVLYSAAGNHGLSWSLWQKVPDETRGRPLGFWSRSYRGSEGNYTPTEKEILAAYEGVQAASEVIGMEAQLLLAPRLPVLGWMFRGKVPSTHHASSATWSKWIALITQRARIGKLNRPGILEVITNWPEGESFGVTDEEQEPVSRAEEAPPYNQLPAEETRYALFTDGSCRIVGMNRRWKAAVWSPTRRVAEATEGEGGSSQFAELKAIQLALDIAEREKWPKLYLYTDSWMVANALWGWLERWKEANWQRRGKPIWAAEEWKDIATRLEKLPVKVRHVDAHVPRSRANEEQQNNQKVDQAAKIGVSKIDLD

SEQ ID NO: 775 - protein, 653 aa, synthetic construct
  source 1..653: note = MG151-126 reverse transcriptase
GIAAVEAEGTRQLNTLPGLSENPSAVGLLKVEEQRVPIATSTVHRRQYRTNRDAVIPIHKMIRELESQGVVSKTHSPFNSPIWPVRKSDGEWRLTVDYRGLNEVTPPLSAAVPDMLELQYELESKAAKWYATIDIANAFFSIPLAAECRPQFAFTWRGVQYTWNRLPQGWKHSPTICHGLIQAALEKGEAPEHLQYIDDIIVWGNTATEVFEKGERIIQILLQAGFAIKKSKVKGPAREIQFLGVKWQDGRRQIPTEVINKITAMSPPTNKKETQAFLGAIGFWRMHIPEYSQIVSPLYLVTRKKNDFHWGPEQQQAFAQIKQEIAHAVALGPVRTGPEVKNVLYSAAGNNGLSWSLWQKVPGETRGRPLGFWSRSYRGSEANYTPTEKEILAAYEGVQAASEVIGTEAQLLLAPRLPVLGWMFKGKVPSTHHATDATWSKWIALITQRARIGNPNRPGILEIITNWPEGETFGLSSEEEEEQVTRAEEAPPYNELPESERQYALFTDGSCRIVGASRKWKAAVWSPTRQVAQAAEGEGGSSQFAELKAVQLALDIAERERWPRLYLYTDSWMVANALWGWLERWNKANWQRRGKPIWAAEEWKDIATRVEKLSVKVRHVDAHIPKSRANEEHHNNQQVDQAAKIEVSQIDLD

SEQ ID NO: 776 - protein, 649 aa, synthetic construct
  source 1..649: note = MG151-127 reverse transcriptase
GVATVNAEKIKQLSTLPGLSEDPFIVGLLQVEEQQVPIATRTVHRRQYRTNRDSLAPIHELIHHLESQGVISKTHSPFNSPIWPVQKSDGGWRLTVDYRGLNEVTPPLSAAVPDVLELQYELASKAATWYATIDIANAFFSIPLAAECRPQFAFTWRGVQYTWNRLPQGWKHSPTICHGLIQTALEQGEAPEHLQYIDDIIVWGNEAEEVFEKGKRIIQILLKAGFAIKKSKVKGPAQEIQFLGIKWQDGRRHVPMEVVNKIASMSPPANKKETQAFLGLVGFWRMHIPGYSQLVSPLYRVTRKKNYFEWGPEQQQAFEHIRQEIARAVALGPVRTGPDVQNILYTAAGDHGLTWSLWQKTPGETRGRPLGFWSRGYRGSEAHYTPTEKEILAAYEGVRAASEVVGTEAYLLLAPRLPVLHWMFKGNIPSTHHATSATWSKWIALITQRARLGKSNRPGILEEIMDWPEGRDFGASPEEVARAQEAPPYNELPEDERCYALFTDGSCRVVGNHRKWKAAVWSPTRQVVEATEGEGESSQFAEVKAIQLALNIAEREKWPVLYLYTDSWMVANALWGWLQQWKKTNWQRRGKPIWAAALWQDIAARVEHITLRVRHVDAHVPKSRATEEHRNNEQVDKAAKIEIAQVDLD

SEQ ID NO: 777 - protein, 649 aa, synthetic construct
  source 1..649: note = MG151-128 reverse transcriptase
GVASVNTEKVKQLSNLPGLSGDPFVVGLLRVKEQQVPIAMRTVHRRQYRTNRDPLAPIQELIRQLETQGVISKTHSPFNSPIWPVRKSDGGWRLTVDYRGLNEVTPPLSAAVPDMLELQYELESKAAKWYATIDIANAFFSIPLAEECRPQFAFTWRGVQYTWNRLPQGWKHSPTICHGLIQTALEKGDAPEHLQYIDDIIVWGNKAEEVFKKGQKVIEILLRAGFAIKKSKVKGPAQEIQFLGIKWQDGRRHVPMEVVNKIAAMSPPTNKKGTQAFLGLVRFWRMHIPGYSQLVSPLYQVTRKKNNFEWGLEQQQAFEHIKQEIARAVALGPVRTGPDVQNVLYTSTGEHGLTWSLWQKVAGETRGRPLGFWSRGYRGSEAHYTPTEKEILAAYEGIRAASEVVGTEAQLLLAPRLPVLHWMFKGNIPSTHHATSATWSKWVALITQRARLGKPNRPGILEEIMDWPEGRDFGALPEEVARAQEAPPYNELPEDERRYALFTDGSCRVVGNHRKWKAAVWSPTRQVVEATEGEGESSQFAEVKAIQLALKIAEREKWPVLYLYTDSWMVANALWGWLQEWKKTNWQRRGKPIWAAALWQDIAARVENVALKVRHVDAHVAKSRATEEHQNNEQVDKAAKIEVAQLDLD

SEQ ID NO: 778 - protein, 570 aa, synthetic construct
  source 1..570: note = MG151-129 reverse transcriptase
MPIVWLTEEPVWVPQWPLPSVKLAAAKDLVKTQLELGHIQHSTSPWNTPIFVIKKKSGQWRLLHDLRAVNAQMQLMGPVQRGLPLLSAIPKDWHVITIDIKDCFFSIPLHPKDSQRFAFTLPSLNHEEPDQRYEWVVLPQGMANSPTMCQIFVAKVLSPIRQRYPSIKVVHYMDDILLAAKSESLVSEAYRDLTQSLAKAGLYIAPEKVQTGTLITYLGTTMNYNKLSPQKITIRTQDLKTLNDFQKLLGDINWIRGYLHIPNITLQPLYAILKGSPDLASPRILTEEAREALGKVEKALQHASLNRFQDTKPFQLCILATARQPTGVLWQEGPLLWIHPYVSPNKSLEHYPEAVALLALKGIQQGVQFFGQPPFSLIIPYSKEQVNVLCATLDIWAVLCCSFQGNIDNHYPAHPLIHFIKRHPIIFPKVTSSTPIPGAVNIFTDGSKTGIGAYVINDSPPVQHQFTPGNPQQVELQIVIEVFKACSFPFNLISDSVYVVQALQILETVGAISTSHNVSIYFSQLQQLITSRTEPFYPVHIRSHTSLPGPLSQGNACADAATRSQLVCLA

SEQ ID NO: 779 - protein, 580 aa, synthetic construct
  source 1..580: note = MG151-130 reverse transcriptase
ANSKPLEVPTALPLKWLTEKPIWIKQWPLAEDKLQALEQLVQEQRDANHIEESTSPWNSPVFVVKKKSGKWRMVTDLRAVNKVIQPMGPLQSGLPLPSLLPKRWPLIIMDLKECFFTIPLQEKDREKFAFTVPTYNNSQPSRSYQWTVLPQGMLNSPILCQYFVNKSLEIIRKQFPKSIIYHYMDDILLSDSNKDTLESMFEEVKKVLPRWGLQIAPEKIQREDSINYLGYRIGLEKIRTQKAQIRRDRLRTLNDFQRLLGDISSLRPAVGITPDLIVHLNKTLDGDKDLNSPRKLTVEAEKELTMIEEKLQEAHVDRVNPNLSSILVILPSRISPTGILMQREDIILEWIFIPHKPSKKLKTYVEKVSELIIKGKLRLRQLAGIDPAEIIVPFTTEEIRKLWEDNEPWQRACANFLGEISSNYPKSDRLNLIKRTSWILPRIVRDAPITGARTFYTDANKSGKAGYKSEELSKVEQSPYNSVQKAELYAILMVLRDFKEPLNIVTDSQYAERVILHIETAEFIPDDTELTSLFIEVQDIIRNRLCPMYITHIRSHTGLPGPLAQGNAEIDQLLIGSVLR

SEQ ID NO: 780 - protein, 570 aa, synthetic construct
  source 1..570: note = MG151-131 reverse transcriptase
MPIPWLTEEAVWVPQWPLSSEKLEAAHHLVQEQLQLGHLEPSVSPWNTPIFIIRKRSGSWRLLHDLRAVNAQMRLFGPVQRGLPLLSALPKEWKVIIIDIKDCFFSIRLNTKDKERFAFTLPAINHEQPDARFQWKVLPQGMANSPTICQLYVQQALAPIRENYPKLKIIHYMDDILLCSPQSAEVEEAYVKLTKSLETWGLNIASEKVQKSSVSKFLGATIYTDVICPQKLKIRHDQLRTLNDFQKLLGDINWLRPFLRVPTTDLKPLFKILEGDSQLTSPRSLTPEAVQAIHKVEQALMTAQLNRIQLNEPFELCILPTPGLPTAVLWQRGPLLWIHPQASQARTIEYYPAAIANLALRGVKNSFTYFGKAPATIITPYNMEQIQILCAMNDDWAILAYSFSGTFDNHFPKHPLINFARNHPLVFPRVTSLTPLPHGKTVYTDGSKTGTGAYVHDGEVVTKNYTPNTPQIVECHIVLEVLQTFHEPLNIVSDSSYVVNAVNSLEVAGLIKASSSVATLFKQIQSQLLLRRSPLYMTHIRAHSGLPGPMTQGNHLADIATRSIAFPLLD

SEQ ID NO: 781 - protein, 579 aa, synthetic construct
  source 1..579: note = MG151-132 reverse transcriptase
MRAIDLPVPHADKIKWKSDSPVWVDQWPLNQEKLTAATKLVQEQLAAGHLESTTSPWNTPIFVIKKKSGTWRLLQDLREINKTMFSMGALQPSLPSPIAIPANYFKIIIDLKDCFFTIPLHPQDRERFAFSIPVTNFKGPMHRYQWKVLPQGMANSPTLCQKFVAQAVDPLRTRWPSIYIIHYMDDILLAGASRTQVLTCSQELTTHLTFFGLQIAPDKIQLTDPYYYLGFELTWNKITTQKIRLRTSHLHTLNDFQKFLGDINWLRPYLKLTTGELKPLFDILQGDPNPSSPRDLSTEAKETLNIVETAIQQQQITFLSYDRPFALIICNTPHTPTGVLWQNNPLLWIHLPSSPSKVLITYPLLVAKIIKMGREKSRQYFGRDPDQLIIPYTKEQIDWLLQNEDDWIIALTSFQGKIDNHYPSHKLLQFSRLHPFIFPKITSSTPLDNAPLVFSDGSSSGIAAYVINSQSHSIQSPFKSAQLVELFAILQIFKVLSQVPFNLYTDSAYIAYSVPILETVPHIKPSTNAVSLFQQLQTFILRRQAPFYIGHLRAHTDLPGPLSQGNALADQNTRFTYSV

SEQ ID NO: 782 - protein, 590 aa, synthetic construct
  source 1..590: note = MG151-133 reverse transcriptase
VSAPDPPVPHADKIIWETQIPVWVDQWPLTQEKLKAASMLVQEQLAADHVEPSTSPWNTPIFVIKKKSGKWRLLQDLRAINRVMRPMGALQPGIPTPVAIPKDYYKMVIDLKDCFFTIPLHPEDRPYFAFSLPRINFQGPMQRFQWKVLPQGMANSPSLCQKYVAQAVDPVRKRWPQIYILHYMDDLLIAAPDTHNLNGCYLDLYKALTTLGLQIAPDKVQTQDPYTYLGLQLQGNQIQTPKIQLRVDHLHTLNDFQKLMGDIQWLRPYLKLPTCVLLPLNDILKGDSHPTSPRKLTPEAQQALNQVTKAITQQFVTQISYNLPLILVILHTPHTPTGIFWQRDPHFKNKGCPLFWVHLPTTSSKVITVYPAQVASVIVKGRLLSRQHFGKDPDKILMPYTKDQTQFLLQTEDEWSIALSGFLGTIDNHLPSDPLLHFAQLHPFIFPKITQKAPIPQALTVFTDGSSNGCAVFVVGNQPTTFETAYQSAQLVELFAIAQVFITFLDKPVNIYTDSAYIAHSVPLLEISPAIKASSNAAFLFHQLQQLIQTRRHPFFLGHIRAHSDLPGPLTQGNAQADAATCSIFPIFAS

SEQ ID NO: 783 - protein, 577 aa, synthetic construct
  source 1..577: note = MG151-134 reverse transcriptase
MRPRPLSITWLSDDPVWIEQWPLTKDKLQAATLLVQEQLRVGHIVPSTSPWNTPIFVIRKGSGKWRLLQDLRAINNTMQPMGPLQPGLPFPTAIPKDWHLIILDLKDCFFSIPLAPQDCKRFAFSLPSINFREPYQRFEWTVLPQGMANSPTMCQYFIAKILQPFRQQFPNFYLVHYMDDILLAGPDRKALFRSYEVLQSLLKGAGLIIAPEKVQIQYPYNYLGYTINKVGITPQRPQFQVNQLKTLHQWQTFLGEIQWLRPSLHVPTGELKPLYDLLRGDPSPTSPRKPTPEALKALRLIETALQEMQVMQVDYSQSLLFIVLPSKLTPTGVFWQTGPIYWVHLPASPSRVLIPFHDLVIQLVWKAKYLGDALFGKTFDVLILPYNQDILSKLRQEHDLWCLFFCSFMGQVDNHYPKSRLLESLKTCPIIFPKILKKDPLPGAQTVFTDGAKNGFAVVSDGTQVIRKRVADCSAQKAEVAALILALQTYSSVPLNVFTDSLYIARLASAIETAPYIGKQSTIMDQLQTVQLLIWARADPLFIGHIRSHSGLPGPLAAGNAMADAATHATNFIYTIT

SEQ ID NO: 784 - protein, 581 aa, synthetic construct
  source 1..581: note = MG151-135 reverse transcriptase
FREMSIAPSFALPLKWLTKQPIWVEQWPLTKEKLSALEKIIQQLLKEDRIETSVSPWNSPIFVIKKKSGKWRLITDLRKINTVIQPMGALQPGLPQPSMIPKNWFLTIIDLKDCFFTIPLQPQDREKFAFTIPSLNNNKPTSRYQWKVLPQGMLNSPTLCQFYVNQPLERLRSLFPSALVIHYMDDVLFAHYDKIKLKQLVTKAESVLGEYGLIIAKEKIQEQPPFEYLGNKLDQTRIWPQKVELRRDCLHTLNDFQKLLGDINWLRPSLGIPTYALKNLFLTLQGDPALDSPRSLSTLAEKELLQIEQIMQTAYLDRIDPNEPVVLVVFPSQHSPTGIFWQKDLILEWLFLPNKEQERLSTYLDKICKIIAKGRLRLRHLIGTDPQQIIVPLTQQEILCQYKLSNEWQLALQDFLGDIHNNFPKNKRLQFLKKTQWILPSIVKTKPIPKADTFFTDANKLGMAGYTGPKTRVEQTPFRSVQKAELAAIIMLLQDYSDPLNLVTDSQYAEHTVKEIETATLIADGSEIVQLFSILQLLIRNRSQPIFITHIRAHTALPGPMSAGNEQIDRLLIGNVQAAMD

SEQ ID NO: 785 - skipped

SEQ ID NO: 786 - protein, 244 aa, synthetic construct
  source 1..244: note = MG160-51 reverse transcriptase
MPVRFENYSHSFDLNGKPVFAPSKLGRRIGNDIKDKVENAFAFEDFYYHLRKGGHVAGIHSHRSNRYYCKLDIENFFYSVARNRVVRSLREISVPRASHYGKWSCVKNPFLNPSYALPYGFVQSPILATLVLARSALGTALARLSAHANVAVYVDDITLSSNDLRSLKACYSELLAAFGDANFSPNMLKCVAPCKNLTVFNCSLVHEETLVEPARIAEFHRFPRSAASMEGFERYCDSVRRGNA

SEQ ID NO: 787 - protein, 253 aa, synthetic construct
  source 1..253: note = MG160-52 reverse transcriptase
MIIKWHTKFKLTHDKWVFVPNANSREKGLAIKLFLVKKWKFPCYYWHLRDQGHIGAITSHLDDLYFYKFDLQNFFSQINKSKITRALTPIVGYKSAREITTESTVKNPDYNSENNMFILPYGFIQSPIIASIALHSSILGKYIQVLTESFNVSIYMDDIIISSRHPIDPKIVTELDWYSRLAKLPIQHAKTQGPSGKITVFNIDLSYKSLIVTPKRLNQFKTAYIETSSEDVRAGILNYLLSVNAALYKNFPN

SEQ ID NO: 788 - protein, 257 aa, synthetic construct
  source 1..257: note = MG160-53 reverse transcriptase
MHSYPRWHHKYELKPGVWVFEPTEETVLIGNEIKGAVQNKWIIPYNYYHLNLGGHVAALNLHKSDTVFVHLDIKKFFNTINKSRITRSLKSLFNYPTSRKYALLSTVKHPNKSPVTFILPYGFVQSPILASLCLRQSVLGIKIDNLSKSSLVRISVYMDDIIISGKDENLLSVLVSELKLSADKSGFILHKEEGPARTITAFNIRLSNNNTVITYDRYKELWHDYNGSKNYNVKHGIATYVSTVNVKQLLGLDGPLI

SEQ ID NO: 789 - protein, 259 aa, synthetic construct
  source 1..259: note = MG160-54 reverse transcriptase
MPFISLWIDRFEIKPGSWVYIPSDECMSLGKSLKKFLEARWTPPKYYFHLQDGGHVSALRAHFSSTYFLHLDIKKFFGSINKSRVTRCLKKYMSYKEARIAASYSSVKIPGSRNSKYELPYGFVQSPLLASICLRSSRLGRVLHQIYLDGHPISVYVDDIVISGTDIGELERIKKEILEAANFSKLSINEKKSEGPAAKITAFNIELSNGKLEVTYDRLESFVSAYLSSGSEAQRDGILGYVSTVNTHQCTELSSRLVK

SEQ ID NO: 790 - protein, 244 aa, synthetic construct
  source 1..244: note = MG160-55 reverse transcriptase
MAFNYEYSFEKNGKFIFVQNKDGFSHAHSLLKFIDENITFPSNYFHYRSGGHVAALHQHIANAYLFRIDIQDFFYSISRNRVAAALHECGFRKARTYAKWSCVRNPVPGKPRYALPIGFVQSPALASLVLMRTPIMRAIERFAARGIYISVYLDDIIGSGPDLAAVEDAYRNILAACELAALPVNPSKLVAPQTEITAFNCVVRHGNARVAPERVAEFFNQSPVTSSVTAFESYCRSVEARNLT

SEQ ID NO: 791 - protein, 254 aa, synthetic construct
  source 1..254: note = MG160-56 reverse transcriptase
METWKHKFLLKEKKWVHIPSEEMIKYGSSLHKYLRRNWRFPLYYYHLRNGGHVAAAKLHKSNDFFCLIDIKCFFESTSQSRVTRELKKIIPYDKARHIAKLSTVRLPNAVRHKFAVPYGYPQSPVLATLCLQNSHAGTVIDSFYRSGIVTVSVYMDDIILSSKDLAILNQHFEILCEALRKSRYEINVSKTQKPATKISVFNLELGHRHLKVESGRMVLFIQAFAKTRNKHEKKSIAKYVHTVNPDQAERHFPK

SEQ ID NO: 792 - protein, 257 aa, synthetic construct
  source 1..257: note = MG160-57 reverse transcriptase
MFGTYLHKFSLPNGHQVFVPSASARRDGSVVQADILQRWRVPHYFYHLRSGGHLAAVKAHLHNRCFSTLDISGFFDSVSRSKIYRALRSIRIHRQKAWKIAQQSTVEKVPGSFSLPYGFVQSPVLASLALDRSALGRRLAVLARSNHVQLSCYVDDVVLSGVEECAVESGRLALIEAARLSNFVINTVKSQLPGPQITVFNIVLSNGEMALTTDRMHQFEKDLIQATEPATAAIFAYVRSVNSAQGNHLTNRLAVAS

SEQ ID NO: 793 - protein, 256 aa, synthetic construct
  source 1..256: note = MG160-58 reverse transcriptase
MNTKWSTRFELKPGKWVFVPTPEMIQVGKEIKSAIEMRWRPPTYFYHLRPGGHVAALKAHLGNAAFLRLDIQDFFGSIGRSRVARCLKTRFGHDSAREWAHASTVRDPSGAARSIIPFGFVQSPIVASLCLAESALGRHLNTLHRRRSVKVSVYVDDIILSSKDPDAVGDELLDGLKKAGHRSRLFFSAEKSQGPGPTIKAFNIELCSKSMRIEDGRMAEFIEALKSSAHPFQRAGILGYIGSVNSDQAVEAGQLG

SEQ ID NO: 794 - protein, 253 aa, synthetic construct
  source 1..253: note = MG160-59 reverse transcriptase
MPAKWLHRFERKPGRWVFEPSPEARADGVEVKALVESRWKAPTYYFHLRRGGHVAALLRHQRSTFFVKVDIADFFGSVSRSRVSRVLKEFFPHTDARRMATASTVQHPDDDARQILPYGFIQSPLLASLALHKSALGKYLDELHRERRFVVTVYVDDIIISGGDHVELCFALSELKTKAQRSRFVFSDDKEQGPAASISAFNIGLATGSPLFILPPKLAEFRDAFRASPSELQRAGIQSYVRSVNHAQADTLP

SEQ ID NO: 795 - protein, 252 aa, synthetic construct
  source 1..252: note = MG160-60 reverse transcriptase
MIPSDRWLYRFKRKSGWIFVPTPDTLVYGKEIKALIEKRWKAPTYYYHLRQGGHVAALKHHSSNEYFLHLDIKSFFGHINTTRVTRCLKGMLSYVKARETAIHSTVHHPKAKHLSILPFGFVQSPIIASVCLRMSALGNYLHELHQQAGMEVSVYMDDIILSSNKLDDLTAALEKVEWASDRSGFPLNKKKQEGPDKMVTAFNIELSRHNLDISAARLTEFQEIYYASPNPNQRAGILNYVQTINASQAANF

SEQ ID NO: 796 - protein, 259 aa, synthetic construct
  source 1..259: note = MG160-61 reverse transcriptase
MEPRWSSKFEIKPGSWVFVPTETEVLFGTELKASIESKWKPPAFYYHLRDGGHVKALQSHVNHEAFLYLDISNFFGCINRSRVTRCLKGMYSYQNSRDIAQRSTVKNPDSSLNKYILPFGFVQSPIIASLCLSKSRLGRFLSASNRQRNFSVSVYMDDIIVSADDKKDLQQLLDEIIPISEQSKFFLNKEKQEGPSSKITAFNIKLTNSVLSVTSERFEEFKKAYKETEDLHVRRGIVGYVETVNKEQASELMKLSCSS

SEQ ID NO: 797 - protein, 249 aa, synthetic construct
  source 1..249: note = MG160-63 reverse transcriptase
MEQKWRDRFELKPGRWVFVPTPESAERGVEIKALVEEQWKPPAFFYHLRHGGHVAAIRAHVENKYFFRADIDDFFGRVGRSRVTRCLKSYFSYAEAREMTNASVVKHPAHGKHILPYGFIQSPILASVALDMSKLGACLRGLAKKKQLKVSVYVDDIIISSNEFGLLNTAADTVLHRAEQALFPIGALKREGPCEAITAFNIELSQHSLKISNQRMDAFRERYLEADSESEKAGILGYIDAVNPLQYLF

SEQ ID NO: 798 - protein, 256 aa, synthetic construct
  source 1..256: note = MG160-64 reverse transcriptase
MPLPKWNCKFQLKKDCWVFVPTEDAKKRGQKIKEQIESFWQPPRYYFHLRDGGHVKALRLHESRKQYLHLDIKDFFGCVNRSKVTRALKSRIGYDAARQIATNSTVRAPNDSGYILPRGFVESPILASICLRNSRLGDYLHKLHDSEHYEISVYMDDIIVSADSDILLQEALTELESRANRSKFPLNTQKTQGPCKQISAFNIELSPGELRVTTERMAKFLDNYKGAESDDCRNGILNYVKSVNPGQSQALKEEDS

SEQ ID NO: 799 - protein, 251 aa, synthetic construct
  source 1..251: note = MG160-65 reverse transcriptase
MTHKWTYRYQLKADRWVFVPTNEAKGVGASIKRLVEGKWKVPEYYFHLRKGGHVAAVRSHSENTYFFRADLDDFFGRVNRSRVTRCLKSWFPYMEARAMASESVVKRPSTEDFILPYGFVQSPILASLALDMSKLGRFLGKLHRRSDVTVSVYVDDIIVSCNDEAQLFQIADLLNQKADESNFPLSLSKKEGPAPEITAFNIELSHGVMRITEERLALLRAEYLSATSEHSKNGIYGYVESVNIGQIENLV

SEQ ID NO: 800 - protein, 245 aa, synthetic construct
  source 1..245: note = MG160-66 reverse transcriptase
MSVAIPNFDYSYLRKGKPVFVPTKVGRRIGHEIKDVVEDIYVFDPIYFHLRRGGHVAAMHHHRDNHFFARIDISNFFYSISRRRVQSALDRAGVGNARFYAKWSTVVSPFGDPRYALPYGFVQSPILASLVVATSDLGRHLLNLPASIKVGVYVDDISLSSDDEAELHQAYDDILAVIASDGLAVNLAKLRPPANIIDIFNCDLAHGIASVTDERVNAFQSSNPSLEAESAFIAYCASVEMGNQP

SEQ ID NO: 801 - protein, 247 aa, synthetic construct
  source 1..247: note = MG160-67 reverse transcriptase
MSVKFENFSFSYLNDHGKRVFVPNEKGYTIGYHVKSLVERATAIEPFYFHLLDGGHVAALHVHRKNQYFARADLKNFFYSISRNRVARALHEIGVPKAGYYAKCSCVKNPYNVPSYSLPYGFVQSPILATLVLSQSVLGAFLQKIHDEITVSVYMDDIAISSPTLEPMKEAFNQLKIKIEEANFQINLEKTKNPLDFMQIFNCNLEINHVSVTQIRKKLFDEKIRSAESRASFDIYCKSVERGNNLS

SEQ ID NO: 802 - protein, 246 aa, synthetic construct
  source 1..246: note = MG160-68 reverse transcriptase
MLENYECKFQTRGKIIFVPNERSVRKGRRILKFFSKFEFPDYFYHYKSGGHVAALHAHLENKLFFKIDIQNFYYSIARMRVTRALRSWGYPGANTLAKWSCVANPYPGPKHVLPIGFVQSPLLASLVLLKSPVAEAIERAIKNGVCISVYLDDFVGSHNDPAVLEAAYGDIRDTCVAARLVPNPAKLLAPRAAITAFNCDLTEGSILVTTERVAKYYASTARTVETDAAFEEYRSLIASANKAAGI

SEQ ID NO: 803 - protein, 274 aa, synthetic construct
  source 1..274: note = MG160-69 reverse transcriptase
MRNVARSFMRDGKRFFVPSNSYWAWSDHSEGLTAASQGRRGWLELKQLILEQWTPHSSNATFALGAHVAALRPHENNTWLAVIDLENFYDHVTRAKVHRALASIGFSRAAAFKVAGESTIRQGEKYLLPRGFRQSPMLAALVLEQSLFGSYLRKGFYRSTVTVFSDDIILSSNDRDELQEEYRHIVNLLRRSNFPINPIKSQPPRREVIVFNMRVSQDGLSFTDVRMWKFLNRAVELVLDKPLIYNKLFGNYLSSINSEQARRLRAWVRARRAG

SEQ ID NO: 804 - protein, 251 aa, synthetic construct
  source 1..251: note = MG160-70 reverse transcriptase
MNPKWSSKFELKPGRWVFVPTPASTATGEWIKAQIEAHWTPPDYYYHLRSGGHVAALKSHIGHTNFLHLDVQDFFGSVNKTRVTRCLKTKVGYALAREWANASTVTHPKNKNRSIIPYGFVQSPIIAALCLAESALGISLAKIRKKKGAVVSVYVDDIIVSSNDSSLCLSLLAMLKTAADRARFTLNPEKERGPASQVTAFNIVLSSSSMQIESARLQEFVEALAKASNQAQRMGILSYVSSVNAEQGNAL

SEQ ID NO: 805 - protein, 244 aa, synthetic construct
  source 1..244: note = MG160-71 reverse transcriptase
MIENYKFKYRSRGKYFFVPNEKCERRGRRMIQFFSKRVDFPDYFFHCKKGGHVAALHDHLANALFFKIDIQNFYYSIARMRVTRALRDWRYPGAGTFAKWSCVVNPGPGPKFALPIGFVQSPLLASLVLMKSPVNDAIERARANGVCISVYLDDFIGSHNEIDVLTAAYEDIRDTCVAAGFIPNPGKLVPPRAAITAFNCELTNGSALVTAGRINKYLASPDRTAMSDAGFADYQALVAARNVP

SEQ ID NO: 806 - protein, 248 aa, synthetic construct
  source 1..248: note = MG160-72 reverse transcriptase
MFQNYEFKFISRGKHIFVQLKANADKAVKSLSRLTGKVSFPVYFYHYQPGGHVAALHHHMQSRFFVKIDISNFYYSISRNRVAAALHSIGYAKSRTFAKWSCVKNPLKKPTYSLPIGFVQSPFLATLVILRSPIAAVLDSAEKEGLRISVYFDDFVISGDDEVLLGKYAQLLVDAMDVSNFHINNKKSVIAPSKQIVVFNCSLENLRTVVTKERVDAFLAQAPTEAALKAFEEYVGRVGAQNLKREAP

SEQ ID NO: 807 - protein, 258 aa, synthetic construct
  source 1..258: note = MG160-73 reverse transcriptase
MVINYHKKIFLGNSKYAYEQTEDFYNRGLIIIEKILKLWTPPSYYFHYQKGGHLAALKAHEASNFFTRIDLSRFYYRVTKNKIIRSLVKAGFSFKEANEIAIESVVKTAEGYCLPYGFVQSSLISSLVLSFSGLGGALRYEANSFNVSVYVDDILISQKGKLSEIRNFSETVCIAAAHSNFPINLEKTEIGKTEIEIFNIDLAQNSKSICDKRLGEFLVEVKSSDSDERANSMIAYVRQVNVIQSNLLYRARYGHIPN

SEQ ID NO: 808 - protein, 259 aa, synthetic construct
  source 1..259: note = MG160-74 reverse transcriptase
MKNFSSKIPLGNNKYAYEQEPNFKVLGEELTDRVLSVWKPPSIFYHLKDGGHVAALRKHLENNHFSNFDVSRFFYRVTKNKILRSLIKHGFSFEDANFAASHSVVKSPDGYHLPYGFTQSPILASLVLHSSRAGKFLRRIDKDVAVSVYVDDIILSHHDDPKKLDETSRQLVEQFGLSGFPISEEKLQVCEPRITSFNVEIGYRHSVITDDRMSHFDEQIRENIDNPFSTEGIQRYVAAINDQQGREIGEMIKQASGRS

SEQ ID NO: 809 - protein, 235 aa, synthetic construct
  source 1..235: note = MG160-75 reverse transcriptase
MPEFRASGENIVEEIRKRWKPPRTYFHLQKGGHVAAVRKHSQNNYFSRFDISRFFFRVKKNMIIKALKSVGFSFLDANSIAYESVVHDGDGFSLPYGFVQSPILASLCLDKSTAGNFLRKLQRDVTLSVFVDDIILSHGNALEKLSLASHQLTTAFAGSGFPVSEAKCEICKERITSFNIHVSHLHLEVTGERMEQFDSDLRLNRENTEVTTGIINYVRSVNALQGAQLAEVLAK

SEQ ID NO: 810 - protein, 275 aa, synthetic construct
  source 1..275: note = MG160-76 reverse transcriptase
MPLAFENFLYSYKKNGKPIYAPNPFGEKLGAELKRKVNKAYKFDSFVYHFKDGSHVLALHQHRNNQFFCRIDISKFFYSVQRNRVKRALKDIHVQRPEYYAKWSTVKNPYGAGYVLPYGFVQSPILATLVLAKSSIGIYLRGLPTSVTVSVYMDDICLSGNDEAELQTAFEGLIVAVAEAGFALNHDKTRPPAAQIDIFNCSLTNGKTEVLQDRIDEFFAEDRSAASEEGFKTYCNIVESMTWRTGHKKKRRRVYFRSLPKPAPVVAAAPVTQTI

SEQ ID NO: 811 - protein, 245 aa, synthetic construct
  source 1..245: note = MG160-77 reverse transcriptase
MPVAIPNFDYSYLRKGKPVFVPTKTARRIGKEIKDAVEGAYAFDPIYFHLRRGGHIAAMHHHRDNHTFARVDISNFFYSISRRRVQSAMERVGMGNVGFYAKWSTVSNPYDDPKYALPYGFVQSPILASLVIATSKLGQHFLELPTSVKVAVYVDDISLSSNDPEALQQAYEATLAIIASDGFTINAGKLRPPAHAIDIFNCDLAHGRTTVADDRIAAFLSNNPSQEAEEAFIAYCASVEIGNQP

SEQ ID NO: 812 - protein, 254 aa, synthetic construct
  source 1..254: note = MG160-78 reverse transcriptase
MPVQFQNFDYSYERDGKPVFAPSTLGRRIGEDIKAQVEAAYQFDPFVYHLRKNGGHVAALHAHRPHLYFARIDIKRFFYGIARNRVRRALSAIGLARGVHYAKWSCVKDPYGGARYVLPDGFVQSPILATLVLMESGIGALLRRLDAEGAVSVSVYMDDISLSSDDLGRLQTAFDALLESLAEAGFEVSPHKIRKPGPAIDVFNCDLEQGRTRVQPERIDRFEAESRSDASTDAFAHYCVSVEEGNAPTARSQS

SEQ ID NO: 813 - protein, 264 aa, synthetic construct
  source 1..264: note = MG160-79 reverse transcriptase
MPLHTFSHRFQTSNGLQIYVPTSEGRELGARIAERVLRCWTPPAYFFHFRPGGHVAAARLHTMNSVFARLDIQTFFDSISRSKISRALRFLRIPREEAFELASLSTVSKEGGKRSLPFGFVQSPALSSLVLDRSALGRCLRDISLGKVALSVYMDDILVSGRDAAVVEAAVGELGSAAKQSGFILNAGKSQVGAPEITAFNLRLGHKMLEVLPERMTLFASTPRTTDGLKERAMVGYVATVNETQSSFLKGVLGLGEEQAGQPL

SEQ ID NO: 814 - protein, 253 aa, synthetic construct
  source 1..253: note = MG160-80 reverse transcriptase
MPAKWLHRFERKPGRWVFEPSPEARAEGVEVKALVESRWKAPTYYFHLRRGGHVAALLRHQRSTFFVKVDIADFFGSVSRSRISRVLKEFFPHTDARRIATASTVQHPDDDARQILPYGFIQSPLLASLALHKSALGKYLDELHRERRFVVTVYVDDIIISGGDHVELCFALSELKTKAQRSRFVFSDEKEQGPAASISAFNIELATGSPLFILPPKLAEFRDAFRASPSELQRAGIQSYVRSVNHAQADTLP

SEQ ID NO: 815 - protein, 254 aa, synthetic construct
  source 1..254: note = MG160-81 reverse transcriptase
MPSRDRWISKFQIKEGTWVFVPTKETIENGYKIKKKIENVWDSPDVFYHLKKGGHVRALQNHLNKKFFLHLDIKDFFGHINRSRVTRSLKDHLPYEEAREIAMESTVRSPESSSSKYILPFGFVQSPIIASVCLSKSAFFRELRSLCKDGFTLSVYMDDIILSHNYCDRLSEQMASLKEASERSGFPLNDKKQKGPDECITAFNVFLTQGELRIIPEKFDELRNAYRNSENKFQRDGIASYVYSINHSQAGLLF

SEQ ID NO: 816 - protein, 255 aa, synthetic construct
  source 1..255: note = MG160-82 reverse transcriptase
MPFYDRWKSRFQIKEGTWVFVPTKETIENGYKIKKRIESVWDPPDIFYHLKKGGHVKALRNHLDKKYFLHLDIKDFFCCINRSRVTRSLKEYFSYQEARGIAIESTVRLPESSNSKYILPFGFVQSPIIASVCFSKSAFFRKLLSLYKDGFTLSVYMDDIILSHNNCDKLKDQMPSLKEASERSGFPLNDKKQQGPGECVTAFNVFLRQSELRIIPEKFDEFNTAYRNSESEFQRSGIASYVNSINSSQAAFLLD

SEQ ID NO: 817 - protein, 254 aa, synthetic construct
  source 1..254: note = MG160-83 reverse transcriptase
MPSRDRWGSRFQIKEGTWVFVPTKETIGNGYKIKRKIENVWDCPEVFYHLKKGGHVKALQNHLNKKYFLHLDIKDFFGHINRSRVTRSLKDHLPYEEAREIAMESTVRSPESSSSKYILPFGFVQSPIIASVCLSKSAFFRELRSLCKDGFTLSVYMDDIILSHNYCDRLSEQMASLKEASERSGFPLNDKKQKGPDECITAFNVFLTQGELRIIPEKFDELRNAYRNSENKFQRDGIASYVYSINHSQAGLLF

SEQ ID NO: 818 - protein, 277 aa, synthetic construct
  source 1..277: note = MG160-84 reverse transcriptase
MSRADRIISLLDNYPEDGKAFRSVELKSNGKLRLIAKPNKPLRKWLRSMNKELGSYFGDWPSFMHGGIKKRSYVTCARQHLNKNCVITLDIRDCFDTINEKQIATVLETNLKLEPELCSKLAHLVSFKGKLAQGFPTSNFICNLYLLDTLRKLNEDFKKQNLTLGNYVDDIVMSGKITQPDRVINQVATELSRIGLKMNKAKVKVMPSHKRQTVCKLLVNKRLSLTKELKRELYSQLARGEMNEASLSGWLANLKTIDPIFAEKLQNFALKKANLEY

SEQ ID NO: 819 - protein, 253 aa, synthetic construct
  source 1..253: note = MG160-85 reverse transcriptase
MEKYSSRFELKPGRFVYIPTTECLEVGRQVVREVCDYWAPPPWFFHFAKGGHLAAVDNHSGHQVLSRQDFSNFYGAVTHSKLVRTLKRVGMPYSRANEIARLSTVRQDSGYALPYGFVQSPFLASLALDQSYIGRTIRDLPRLGISRSVYMDDMIVSHATEHGPVDEAIKLLKSSAQISSFPLNEEKSQGPANQIEVFNIDISAELLSIAPDRLLEFRSNIIEFGPGLASDAIIRYVDGINAGQADLLRDELG

SEQ ID NO: 820 - protein, 257 aa, synthetic construct
  source 1..257: note = MG160-86 reverse transcriptase
MDRWINRFKLNHSIWVFVPSDDSRQVGRKIKTAIEKNYKFPEFYFHLKNGSHIKALNSHMQHEYFASLDIENFFGNINKSRITRVLKIFFSYDEAREYANWSVVRNPDENSNESILPFGFVQSPALASLCLDKSKLGRELRNINNLDVSVSVYMDDIILSSNDKALLYKSLKKVEEASEKAKFPLNKDKKNNPSNKVTVFNIDLSRGKLQINNKRIKEFQSAYEKTGLDEEKKGILNYIKTINPIQEKQFIDKINKI

SEQ ID NO: 821 - protein, 142 aa, synthetic construct
  source 1..142: note = MG160-87 reverse transcriptase
MPFGFVQSPALASLCLDKSKLGRVLRNINNLDVSVSVYMDDIILSSNDKALLYKSLKKVEEASEKSKFPLNKDKKNNPSNKVTVFNIDLSRGKLQINNKRIKEFQSPYEKTGLDEEKKGILNYIKTINPIQEKQFIDKINKI

SEQ ID NO: 822 - protein, 281 aa, synthetic construct
  source 1..281: note = MG160-88 reverse transcriptase
MEHLEQLKVEELASLLGLDSSALTELAQKAPRLYREKKLAKKSGAVRIIEAPHDVLKKTQRLLLNKVLVGLPVDRMLHGGKGSSTIKAVSPHVRKAVVMTLDIRDFFPSVTSRMVRTMLRKRGASEDVARLLTRIVTRKHHLPQGAPTSPCIARLVLHPVAGHVRRALQSVGTAASASIYVDDVTVSGPPGIDRLRNTIVNIIERHGFRVHPDKVKIMPTEEEQESLGIRLNNGIEPTPAFLTKLDETELALGSAHPRVRGMHGYARSLRRAQSVLSKEGG

SEQ ID NO: 823 - protein, 261 aa, synthetic construct
  source 1..261: note = MG160-89 reverse transcriptase
MRNYSSRFRLPNGKWAYIQFKGLAGDANRHMRRIRGFWNPPDHFFHFQKGGHVAALRQHQGRAWYGKIDLSRFFNHVTRHRVTRCLKRLGYSFRDAEEFAVASTVCVDHKEWRFALPYGFVQSPLLASIAFDLSELGNCCRRLNSGNCAVSIYVDDIVISGDTKAEVEAALSEMHQAARMSNFAINTAKSRAASTALQAFNIDFDAHEMNISNERFDEMGRDVMFSGAGQVSDGILGYVRSVNPRQADQLLRNFPRAFARE

SEQ ID NO: 824 - protein, 254 aa, synthetic construct
  source 1..254: note = MG160-90 reverse transcriptase
MAFHELWDQKFELSPGKWVFVPSVESRERGKYIVSEIKKKWEAPSYFYHCHRGGHVEAVKKHLTHTYLCCIDIENFFTSINRSRVTRTLKKYFGYKIAREFAKDSVIRLSIDSSSKCILPFGFLQSPIIASICLHESALGDALNKLALTPNLIVSVYVDDIIISCNDLHLLQKQFEYVITIAKKSGWKISDRKTIPPGNQISVFNIEMSCGDLSISSERMSLFYKAYHDAISEHQKEGILRYIRSINPEQVDFL

SEQ ID NO: 825 - protein, 254 aa, synthetic construct
  source 1..254: note = MG160-91 reverse transcriptase
MAFHELWEERFELAPGKWVFVPSAESRERGEHIASKIKEKWQAPAYFHHCHQGGHVRAIKQHLANTHFCCVDIEGFFTSINLSRVTRALKQYFGYEVARKFARDSVIRLVGDVDSQYILPFGFVQSPIIASVCLDQSALGRVLHELTFKQDITVSVYVDDIILSCNDPCRLQHEFESIKAAADRSGWKVSTSKTQPPSEQIVSFNIHLSQGNLVISSERMGLFVDAYNQATSAHQKEGILRYIRSINPAQATFL

SEQ ID NO: 826 - protein, 284 aa, synthetic construct
  source 1..284: note = MG160-92 reverse transcriptase
MGNNVTTEILATALGLATDQLLDLAARAPRMYRHKRKPKKSGRGMRTIDAPHPGLKKVQRKLLDHVLTMFPTHSTLFGVKGHTTTSAVRCHTKKAVVITMDISDFFPSIKDFMVRRALLSRGVPADAAKVMTRLMTCNNHLPQGAPTSTRMAMLVLEPAAAEIQRLIASIPKTDLSVWVDDATLSGPRGVTRLIPTIVRIFNRYKFTVHPDKLKVMFQSQEQVSLGIKLNNGIEISSSFMEKYKKEGLPLPEHNPRRKGMESHIRHINGQSPKRPARRNTAVMP

SEQ ID NO: 827 - protein, 291 aa, synthetic construct
  source 1..291: note = MG160-93 reverse transcriptase
MSMGNILTTEILATALGLATDQLLDLAARAPRMYRHKRKPKKSGRGMCTIDAPLPDLKKVQRKLLDNVLAMFHTHPSLFGSKGHAIKSAVRCHTKKAVVITMDISDFFPSIKDFMVRRALLSRGVPADAAKVMTRLMTCNNHLPQGAPTSTRMAMLVLEPAAAEIERLIASIPKTDLSVWVDDATLSGPIGMTRLIPTIVRIFNRYKFTVHPDKLKVMFQSQEQVSLGIKLNNGIEISTSFMEKYKKEGLPLPENNPRRKGMESHIRHINGQSRQQPVRQEKAGDTENACE

SEQ ID NO: 828 - protein, 256 aa, synthetic construct
  source 1..256: note = MG160-94 reverse transcriptase
MPKTLWINKFEIKPNKWVFVQSLEHKNRGAALVVSLAKRWSPPSFYYHLREGGHVAALKSHGQHQYFFYIDIKDFFGSINRTRVTRVLKKHMKYDVARSVANFSTVKIKINSEEKYVLPFGFTQSPFLSAMCLDDSQLGRLLREYSVLASSGSLNVSVYMDDIILSSNNLKYLTDAGQSILAAANRSGFDIKDIGSAGVKELVEVFNVQLSQGLLEITPERMHEFSMRYAASSNEHERLGIYNYVVSVNPAQAAFL

SEQ ID NO: 829 - protein, 285 aa, synthetic construct
  source 1..285: note = MG160-95 reverse transcriptase
MSNFSSLEKNVGIYGFSKEELKKIKENFKNEYKIVDIPKPKGGYRTIFSPSIRLKSLLRILNEQLSTEASFPNGITAIQGRGLKYHLEPHIKKTLVMTTDIKDFFPSISIENLKLSLLKYTSLEEVLISEILEFSLVEDTIPQGFPTSSFFSNISILNLWERIQKLIKGMNIDISVYSDDWAISGDPDEVFLAFDILRKEIRREGFKLSNGKKKVMWKGQDQIVCNIKVNKGLEITEKYIEEVKEEVRLYRGGFPFGKIEDLKLLGKIEYIRGINRKQAKSLKVD

SEQ ID NO: 830 - protein, 233 aa, synthetic construct
  source 1..233: note = MG160-96 reverse transcriptase
MIGLYLYLAIVAKKIGHEIKKLVDDAVDFDPFFFHLRQGGHVMALHAHRKHKYFARADISKFFYGVGRNRVTRALHEIGIPHAGTYAKWSCVKNPYGDPRYSLPYGFVQSPILATLVLMRSAVGEFLRNLSKTVTSSVYVDDISLSCDSKTEIDAAFNCLLEMIEASNFKIAKDKTQAPAEQITLFQCNLAYQQTAVRGERRSEFYAVERSVASASAFERYCDSVAERNAPTA

SEQ ID NO: 831 - protein, 279 aa, synthetic construct
  source 1..279: note = MG160-97 reverse transcriptase
MGKTETLEKLLEEYPSDAGAFCTFEPKPDGASRPIVKPNKSLNKWLKQVKRALYQRRKDWPTFIHGGVKKRSYVSFARPHTNKKTVIAIDIHNCFGSITQQEVQNALVKKLGLPDGLASRLAAKLCYKRRVPQGFATSSYLTNLYLNDTLLTINRKLRRLQVDMTIYVDDIALSAQQMNSAEIINTVILELSRARLLVKKAKIKVMHSHRPQVICGLIVNKGVALTRQKKKQLFSDVANKRISEVSLQGWLANLNMIDKELMTKLEAYAIQKGVVKVGA

SEQ ID NO: 832 - protein, 279 aa, synthetic construct
  source 1..279: note = MG160-98 reverse transcriptase
MGNTEELEKLLAEYPADAGVFCTTEPKRDGTSRPIVKPNKSLNKWLKSVKRALYRQRKDWPTFIHGGVKKRSYVSFARPHANKNTVIAIDIRDCFGSITQREVQQALIDKLSLSSGLASRLAAKLCYRHRIPQGFATSSYLTNLCLNDTLLQVNRLLRRERVDMTIYVDDIALSGQQVNAAEVINLVTVQLSRAGLAVSKAKIKVMHAHAPQIICGLVVNKGVALTRQKRKEIFSDVANGRMTETSLEGWLANLNMIDKQLMRKLQAYAIEKGVIRAGA

SEQ ID NO: 833 - protein, 249 aa, synthetic construct
  source 1..249: note = MG160-99 reverse transcriptase
MPVQFENYTHSFELKGKPVFAPSERGRRIGNDIKLKVEAAANFDAFYHHLQPGGHVAALHAHRDNRYFARVDIERFFYGIGRNRVARAIRESGIRRAAHYAKWSCVKNPYGDPSYSLPYGFIQSPCLATLVLMLSPVGVFLRSLSRELTVSVYMDDISLSAADQARLMTAYEELTACMQHSGFALNAAKCRPPAVALDVFNCSLTGGLTQVLEDRVAKFFSVARTAPSEASFMRYCAAVEAGNAALPKS

SEQ ID NO: 834 - protein, 178 aa, synthetic construct
  source 1..178: note = MG160-100 reverse transcriptase
MMKVSQRWSSKFQIKPGSWVFVPTDEAVKYGNFIKASIEAIWSPPNYYYHLRDGGHVKALSSHLEHQFYIHLDISNFFGCINKTRTTRSLKRYWSYDAAREMASQSTVRDPNSPKNARYILPFGFVQSPIIASLCLRNSKLGSYLAKINKMAEITVSVYMDDIIISSNDAQQLAVILA

SEQ ID NO: 835 - protein, 270 aa, synthetic construct
  source 1..270: note = MG160-101 reverse transcriptase
MHNYVHRIPLGEDKWAYEQKPSLIEPANIWMDEIRKRWQPPNYFFHLRSGGHVAAARSHLKNCYFAKTDLRRFFEQVTKNRIIRRLSGLGFQPDDAIDFAVASTIRIRTDQQDRFALPYGFVQSPLLASLDTDKSELGRTFSNLDKSGHTISVYVDDIVISGPTKEQVEEGLALIHNAASVSNYEINEAKSTNTLPSMVAFNIAFGHGYMHVTEDRMTEFEQAILTTYDEDAKIAVLAYIKSINHAQAVDLFNKFESHLECARHIVIGMR

SEQ ID NO: 836 - protein, 245 aa, synthetic construct
  source 1..245: note = MG160-102 reverse transcriptase
MSVAIPNFDYSYLRKGKPVFVPTKVGRRIGQEIKEVVEDAYVFDPIYFHLRRGGHVAAMHYHRDNHFFARIDISNFFYSISRRRVQSALDRARVANARFYAKWSTVVSPFGDPRYALPYGFVQSPILASLVVATSDLGRHLLNLPASIKVGVYVDDISLSSDDEAELHQAYDDILAVIALDRLAVNLAKLRPPANIIDIFNCDLAHVIASVTDERVNAFQSSNPSLEAESAFIAYCASVEMGNQP

SEQ ID NO: 837 - protein, 375 aa, synthetic construct
  source 1..375: note = MG160-103 reverse transcriptase
MAVQFGNYTHSFEMKGKPVFAPSERGRRIGNDIKQQVEAAATFDDFFHHLQPGGHVSALHAHRENRYFARVDIKRFFYSIGRNRVARALRELGIERATHYAKWSCVKNPYDDPSYALPYGFVQSPILATLVLALSPVGAFLRALSRELTVSVYMDDISLSSADKERLQFRFEELCSLMQRSGFALNAAKRRAPAQALDVFNCNLIGGRTQVLESRVANFFRLRAQNQAKLASCGIALLLRPATQNRWHHSRFANDATAIRNRWRVSQTDLIWSACSIVRKPARISSTTTSCVRRIVNTCPVIPASRSAWRIARPSSIAKACRRLMATAMAEHSPGPRRGVADRRPNSATSTGSFTASSVTQSAVIASAYRSTCAG

SEQ ID NO: 838 - protein, 375 aa, synthetic construct
  source 1..375: note = MG160-104 reverse transcriptase
MAVQFGNYTHSFEMKGKPVFAPSERGRRIGNDIKQQVEAAATFDDFFHHLQPGGHVSALHAHRENRYFARVDIKRFFYSIGRNRGARALRELGIERATHYAKWSCVKNPYDDPSYALPYGFVQSPILATLVLALSPVGAFLRALSRELTVSVYMDDISLSSADKERLQFRFEELCSLMQRSGFALNAAKRRAPAQALDVFNCNLIGGRTQVLESRVANFFRLRAQNQAKLASCGIALLLRPATQNRWHHSRFANDATAIRNRWRVSQTDLIWSAGSIVRKPARISSTTTSCVRRIVNTCPVIPASRSAWRIARPSSIAKACRRLMATAMAEHSPGPRRGVADRRPNSATSTGSFTASSVTQSAVIASAYRSTCAG

SEQ ID NO: 839 - protein, 375 aa, synthetic construct
  source 1..375: note = MG160-105 reverse transcriptase
MAVQFENYTHSFELKGKPVFAPSERGRRIGNDIKQQVEAAATFDDFFHHLQPGGHVSALHAHRENRYFARVDIKRFFYSIGRNRVARALRELGIERATHYAKWSCVKNPYDDPSYALPYGFVQSPILATLVLALSPVGAFLRALSRELTVSVYMDDISLSSADKERLQFRFEELCSLMQRSGFALNAAKRRAPAQALDVFNCNLIGGRTQVLESRVANFFRLRAQNQAKLASCGIALLLRPATQNRWHHSRFANDATAIRNRWRVSQTDLIWSACSIVRKPARISSTTTSCVRRIVNTCPVIPASRSAWRIARPSSIAKACRRLMATAMAEHSPGPRRGVADRRPNSATSTGSFTASSVTQSAVIASAYRSTCAG

SEQ ID NO: 840 - protein, 189 aa, synthetic construct
  source 1..189: note = MG160-106 reverse transcriptase
MDIANFFGRINRTRVTRVLKSLFGYTTAREYAKVSVVRDPSHSHMPPKYMLPFGFTQSPLLASLCLDASSVGDLLKKIDVMPELRLSVYVDDIIISSNDIEKLKEVFDRLKTAVNRSGWALSTTKTQPPNVAITAFNICTSYGNLTITEGRMEEFAEEYVNATSDYVKEGIVSYVTSVNPAQARKFDGL

SEQ ID NO: 841 - protein, 254 aa, synthetic construct
  source 1..254: note = MG160-107 reverse transcriptase
MAFHELWEDRFELAPGKWVFVPSSESRQRGEHIVSRIKEKWQAPAYFYHCHHGGHVRAVKKHLANTYFFRVDIESFFTSINLSRVTRVLKKYFGYEVAREFARDSVVRVAGDVDFQYILPFGFVQSPIIASLCLDQSALGRALYELASRPDITVSVYVDDIIISGNSLHSLQKEFEIIKENTGKSGWNLGASKTQTPSDRILAFNINLSQGSIAISPERMSSFFEAYHQSASPHQKEGILRYIRSINPAQAAAL

SEQ ID NO: 842 - protein, 252 aa, synthetic construct
  source 1..252: note = MG160-108 reverse transcriptase
MPAKWEHRFERKPGRWVFVPTDEARVAGEHIRAVVAGLWRAPTYYYHLRAGGHVAALREHQASSFFFKVDISDFFGSVSRSRLSRVLKVYFSHQKALHVATESTVRDPANPGKAMLPYGFVQSPLLASLALHSSRLGALLDRLSKEEGLVVTVYVDDIVVSGHDVERLRDVLDEVKVVAGRSRFELSDEKQQGPASAIEVFNIKLSAHAELALTDGRLAEFGEALRAATSAYQVAGIGSYVQSINTAQAAAL

SEQ ID NO: 843 - protein, 252 aa, synthetic construct
  source 1..252: note = MG160-109 reverse transcriptase
MTPSDQWVYRFRKKSGWVFVPTEDTIAYGQEVKALIEERWRTPSYYYHLQQGGHISALCQHKPHKYFLHLDIKHFFGNIRASRVTRCLKEIVSYAEAREIAIYSTVHHPYAKRLSILPFGFIQSPIIASVCLKMSALGKVLHELHKKSCMTVSVYMDDIIISSDNIDDLENTLAKIEQASDRSRLPLNKTKQEGPGKMVTAFNIELSQHNLDITPGRLSEFQKIYHASTNESQKAGILNYVKAINNAQAKAF

SEQ ID NO: 844 - protein, 255 aa, synthetic construct
  source 1..255: note = MG160-110 reverse transcriptase
MQSKWINRFELKPGRWVFEPSAESKALGQEIKASVERAWRSPKFYFHLRSGGHVEAVRSHLENTHFLHIDIQDFFGSVNRTRITRCLKSRVGGYAIAREWANASTVRSPVDEKRHMLPYGFVQSPILASLALDESRLGKRLRTIAESPRTAVSVYVDDIIVSTQEAAPLASHFAVIKQDAALSGFTLNEVKAAGPALTITAFNIVIAHASIAIEGARLDEMVQAYSQSESSQQKAGIFGYVRSVNTEQAEAFTGS

SEQ ID NO: 845 - protein, 258 aa, synthetic construct
  source 1..258: note = MG160-111 reverse transcriptase
MHIHERWIHKFQIKENSWVYVPTEAAKEFGETVKETIESKWKAPKIYYHLSSGGHVKALNQHIQNNYFLHLDIKDFFGNITRNRVTRCLRRFYPTHADARDVATESTVHLPNSDPVKHILPFGFVQSPILASICLKQSALGKLLEQISKESDFELSVYMDDIIVSSNNLDSLKTVFPRIEAASIRSKLPLNADKQEGPGEIVTAFNVRLTHNLLELTDERMKQFEEVYNNSTNEAQKNGILSYLASINLTQHDILHNT

SEQ ID NO: 846 - protein, 249 aa, synthetic construct
  source 1..249: note = MG160-112 reverse transcriptase
MAVQFENYTHSFELKGKPVFAPSERGRRIGNDIKQKVEAAAIFDDFFHHLQPGGHVSALHAHRENRYFARVDIERFFYGIGRNRVARALRELGIERATHYAKWSCVKNPYDDPSYALPYGFVQSPILATLVLALSPVGAFLRALSRELTVSVYMDDISLSSADKERLQFRFEELCSLMQRSGFALNAAKRRAPAQALDVFNCNLTGGRTQVLESRVAEFFSFARTEPSEASFLRYCAAVEAGNAEPLSL

SEQ ID NO: 847 - protein, 246 aa, synthetic construct
  source 1..246: note = MG160-113 reverse transcriptase
MLTNYKFKYRTRGRHIFVPTEQCERKGRRIIKFFARFEFPEYFYHYKSGGHVAAMHTHLANKLFFKIDIQNFYYSINRMRVTRALRSYAYPGANTLATWSCVKNPYPGTTNHVLPIGFVQSPLLASLVLMKSQVDTAIARAMENGVCISVYMDDFIGSHDDPDVLEAAYTNIRTASVAAGLIPNPDKLVPPTEAITAFNCDLTFGSANVTAERVAKYEAKETRTPLSDASFAQYRHLVASANKSAP

SEQ ID NO: 848 - protein, 244 aa, synthetic construct
  source 1..244: note = MG160-114 reverse transcriptase
MIKNYKFKYESRGKFLYVPTERCDQKAERLASFFERKAVFPSYFYHYRSGGHIAAIHEHIKNDFFFRIDVKNFFYSIRRNRVARVLNAYGFGPARAFAKWSCVLNPYPEGGFVLPIGFRQSPLLASLVLARSPVVQAISRAMTRGVFVSVYFDDFIGSALDADALRTAYDDILAACDQAQLYPNEAKLHETATAIQAFNCDVKKGSARVSQLRREKFEGSSPTPSARVSFDYYCKLVERENRAH

SEQ ID NO: 849 - protein, 281 aa, synthetic construct
  source 1..281: note = MG160-115 reverse transcriptase
MNKTAETLEKLLASYPVDANMFRTSQEKSDGGRRPIVKPNKSLRKWLKQMLRELRSVRNDWPTFIHGGIRKRSYVSFARPHTNKKTVVTLDIRDCFGSISQKQVAESLVTKLVLQKNLAQQIAKKLCVDGKIPQGFATSNFLTNLYLNDTLLVIRRKLSKKHVEMTIYVDDIALSGNNFDSSEIINTVCIELSHAKLAIKKAKVRVMHSNRRQIIVGLVVNKGVAIAKEKRTELFSLVSKKTISDTSLNGWLANLNMINKPLKKKLAAFANKNGYDIDAKK

SEQ ID NO: 850 - protein, 243 aa, synthetic construct
  source 1..243: note = MG160-116 reverse transcriptase
MIVNYEFKYRSRGKWFFVPNDKCERRGQRMLAYFKRRVTFPDYMYHFKKGGHVAALHAHLSNNLFFKIDIQNFYYSIARMRVTRALRQWGYPGANTFAMWSCVRNPLPGPAHALPIGFVQSPLLASLALMKSEVADAIDRAIAKGVCISVYLDDFIGSHNDLAVLTAAYEDIRDTCVAAGFIPNPGKLVPPQAAITAFNCDLTNGTAEVTAARVAKYFARTDRTPLSDSGFDEYRDLVRSQNV

SEQ ID NO: 851 - protein, 243 aa, synthetic construct
  source 1..243: note = MG160-117 reverse transcriptase
MIVNYEFKYRSRGKWFFVPNDKCERRGRRMLAYFKRRVAFPDYMYHFKKGGHVAALHTHLNNHFFFKIDIQNFYYSIARMRVTRALRQWSYPGANTFAMWSCVRNPLPGPKHALPIGFVQSPLLASLALMKSEVAEAIDRARAKGVCISVYLDDLIGSHDDEALLAEAYEDIRATCVAAGFIPNPGKLVPPQAAITAFNCDLTNGTAEVTAARVAKYLGRIDRTALSDLGFEEYRGLVRSQNF

SEQ ID NO: 852 - protein, 250 aa, synthetic construct
  source 1..250: note = MG160-118 reverse transcriptase
MPIKWSSKFELRPGKWVFVPTPESIDTGREIKRALEKCWIPPPYYFHLRAGGHVEALRSHLKHSQFLRIDIQDFFGSINRTRVTRSLKKKFPYKIAREYANASTVPDPSAKRIILPFGFVQSQIVAAVCLAESALGIYLDKLKNNSNVELTVYVDDIIVSSSDNALLDQVLQDIKAAAEKARFILNPIKQEGPASIITAFNVTLMSGNMEVDPVRLKLFQEALAEATSKHQIAGIRAYVMSVNTIQGLRL

SEQ ID NO: 853 - protein, 244 aa, synthetic construct
  source 1..244: note = MG160-119 reverse transcriptase
MIVNYEFKYRSRGKWFFVPNEKSERRGRRMLAYFKRRVVFPDYMYHFKKGGHVAALHAHIHNRFFFKIDIQNFYYSIARMRVTRALRQWGYPGANTFAMWSCVRNPLPGPKHALPIGFVQSPLLASLALMKSQVADAIERAMAKGVCISVYLDDFIGSHDDEALLTAAYEDIRNTCVAAGFMPNPSKLISPQATITAFNCDLTNGSAEVTAARVAKYLGRTDRTPLSDAGFDEYRHLVRSQNTP

SEQ ID NO: 854 - protein, 276 aa, synthetic construct
  source 1..276: note = MG160-120 reverse transcriptase
MIAADRITYLLDHYPPNARVYKSRLPKPGGGFRPITKPNKELKKWLRDMNRALRVQYNNWPKFMHGGIKKRSYISYARLHVNKPCVITIDIKRCFDSITTDEVAEALQRYLQLPEGGCKQLAQRLCFLGHIPQGFPTSNYLCNAYLCEPLSALQKSLATQGIMLTNYVDDLAASGRISAPDEVVNEIALTLSHAQLAVSKAKVRIMPSSRRQLICGLIVNKRLSLTRSLKLKLLRDIATGQMSEDTAMGWISHLKMINPTFQQKLRAYAFKKGVLK

SEQ ID NO: 855 - protein, 252 aa, synthetic construct
  source 1..252: note = MG160-121 reverse transcriptase
MDKWQHKFEIKKGQWVYVPTKSMLQFGKKLHQKIRAKWTPPLYFYHMRDGGHVASARKHINSQYFALIDIKSFFESTSQSRVTRELKNIFKYKDAREIAKLSTVKNPMVHGTKYVIPYGYPQSPILATLCLHKSYCGNLLRSINKSGNVLISVYMDDIIISGNDLNLLTTTYSLLRDALEKSGYLMNEVKSQSPTKTLKVFNLELSHQSLRVSPKRIVEFLIAYAKSTSFYEREGIAAYVGSVNNKQANLFP

SEQ ID NO: 856 - protein, 272 aa, synthetic construct
  source 1..272: note = MG160-122 reverse transcriptase
MIGTIQNLDAKALSFCLECNYSDLLHLADNAPGQYHEIKIEKRGKSRIIEIPTPYLKKKQKMLLTKVFYPLKTHPRLYGGPGSSIKKAATDHVRKPIVITIDIKNFFPNVNTIKIREMLHRRKASKDVAELLIRLTTYKNHLPHGSPTSPCIGRLILNPFAINLEKMLRRIHPKAFFSIYVDDIIISGPLGIKRAIRPIYQIIKRYGFEPNERKTKVMDYKNEQASLSIRLNRRIEPTTAYLKEVEALENILSSTDPKLIGKKAHIQFLFKD

SEQ ID NO: 857 - protein, 271 aa, synthetic construct
  source 1..271: note = MG160-123 reverse transcriptase
MQTDLSYLTRDNLSKSLSITSDKLINFTKSPKKFYYKKSKRKKNGGTRILEIPIHSLKLVQKYLLKKILYKLPISPMLFGGPGSSTKKAVISHTQKATVTAMDINNFYPSIKSYHIRNVFLQHKATKEIAEILTRLVTYKNHLPQGAPTSTYVGLLVLQSAAQQIEKMLKKIPRSSFSIYVDDIIISGPEGIKRFVPIIRKILKRYRFEINDKTNIMNRDKEQVCLNIGLNNGIEPPKSYLQELKELARKVPASDPRLRHKKAYIDFLLNN

SEQ ID NO: 858 - protein, 271 aa, synthetic construct
  source 1..271: note = MG160-124 reverse transcriptase
MAQILENLSVDSLAVKLGLSKTALIDLVKDVPRLYYEISIPKKDGSERKLEIPLPIFKKLQKRLLDRILHKIPTHPKLYGRPGTSTKKAVKEHVKKEAVITMDITNFFLSTKSACVKNMLIENGSRDDVAKLLTRLVTHKKHLPQGSPTSPCIARLMLQGFAEGLEKFLKQIPYSAFSIYVDDITISGPKGIKHAKSIVKKILKRYGYDINESKTKIMNQTEEQISLNIRLNERIEATTQFLKEIEELEKEVPPYDTQLLGKKSYIKYLMK

SEQ ID NO: 859 - protein, 273 aa, synthetic construct
  source 1..273: note = MG160-125 reverse transcriptase
MKTLDNFSIEKLSKATGLPRDALLDLTKDVPFLYHESYIPKKKQGHRKLEIPHPVLKKFQKVLLKKVLNKIPTHPCLYGRPGDSVKKAVREHVKKKVIITMDIEDFFPSTKAFMIRNAFIRNGTTKEVAKLLTRLVSRNYHLPQGAPTSPCIGRIILHPFAQEVEKIFINIPMSSFSIYFDDITISGPKDIKGFRNTIGEMLKRYGYMVNKNKTKVMDRNQDQISLGIRLNDRIEARKEFMREIEELEKKVPPSDLKLRGKKSYVEFLRRPDE

SEQ ID NO: 860 - protein, 249 aa, synthetic construct
  source 1..249: note = MG160-126 reverse transcriptase
MLHLADNAPRQYHEIKIEKGEKTRIIEIPTPYLKKKQKMLLTKVFYPLKTHPCLYGGPGSSIKKAATDHVRKPIVITIDIKNFFPNVNTIKIREMLHRRKASKDVAELLIRLTTYKNHLPHGSPTSPCIGRLILNPFAMNLEKMLRRIHPKAFFFIYVDDIIISGPLGIKRAIQPIYQIIKRYGFEPNERKTKVMDYKNEQVSLSIRLNRRIEPTTAYLKEVEALENILSSTDPKLIGKKAHIQFLFKD

SEQ ID NO: 861 - protein, 274 aa, synthetic construct
  source 1..274: note = MG160-127 reverse transcriptase
MFKTLEKLNIDNLSKILNLSRYEFLRFVKIAPNQYHEVTIRKNDKTRIIEIPNPTLKKVQKLLLEKVLYGLHTHPRLYGYPGSSIKKAVSSHVQKPIVITIDIKDFFPSVKSSQIEKMFRRRKANERIARILITLTTYKKHLPHGSPTSPCIGRLILNPFALNLEKMFNRIHPNAFFSIYVDDITISGPEGLKNSIPTIYKMINRFEFEANKDKTNIMERDKEQISLNIRLNKRIEPTTKFLKEVEELKESLPSLHPTLIGKKAFIKFLFRNEN

SEQ ID NO: 862 - protein, 274 aa, synthetic construct
  source 1..274: note = MG160-128 reverse transcriptase
MTQILESLSVEILAEKIGLPSNALLELSTDAPLLYFKKLIPKNGSSTRKLEIPYLILKNFQKKLLKKILHKIPSHHKLYGSPGTSIKKAVAEHVRKATVITMDIKDFFPSIKVFKVKNTFIRNGATIGVAEILSRLVTHKNHLPQGAPTSPCIGRLVLQQFADEFEKLLEKIPKSSFSIYVDDITISGPEKIKGIQNTVGKMLNRHGFEINKNKTKIMNRDEEQVSLNIKLNKRIEATERYLKEIEELEKRVPSSDPVLRGKKSYVKYLMRPDY

SEQ ID NO: 863 - protein, 271 aa, synthetic construct
  source 1..271: note = MG160-129 reverse transcriptase
MQTDLSYLTCDNLSKSLSITSDKLINFTKSPKKFYYKKSKRKKNGGTRILEIPIHSLKLVQKYLLKKILYKLPISPMLFGGPGSSTKKAVISHTQKATVTAMDINNFYPSIKSYHIRNVFLQHKATKEIAEILTRLVTYKNHLPQGAPTSTYVGLLVLQSAAQQIEKMLKKIPRSSFSIYVDDIIISGPEGIKRFVPIIRKILKRYRFEINDKTNIMNRDREQVCLNIGLNNGIEPPKSYLQELKELARKVPASDPRLRRKKAYIDFLLNN

SEQ ID NO: 864 - protein, 209 aa, synthetic construct
  source 1..209: note = MG160-130 reverse transcriptase
MAAARLHESSAAIVRLDIDRFFDHVTRTKIARALRAIGFPADEAFEAARLSTVRKPGHAGYSAPFGFVQSPLLASLVLDRSALGRSLRRIKSAGALLSVYVDDILLSSDSAATTQAFLAEVQVAANASGLPLNLAKSQLQPGPAAEAFNLHIGNGMLRVNGLRMTKFSSDAYYASAEQLEGYAYYLNSVNHNQAIKFLDDLEQAGLRLP

SEQ ID NO: 865 - protein, 251 aa, synthetic construct
  source 1..251: note = MG160-131 reverse transcriptase
MTHKWTHRYELKPGRWVFAPTEEAKKTGARIKREVAAHWKPPTFYFHLRSGGHVAAVHTHVASQYFFRADLEDFFGRVNRSRVTRCLKSWFSYADAREMASESVVRRPGHNGFVLPYGFVQSPILASLALDKSKLGSYLRALNGRPNLRVSVYVDDIIVSSTDESCLGDAVAKLKQLADLASFPINASKTEGPGHGVTAFNIELSHAALQITDARLAELKADYDAAASGYSKAGILSYVRSVNEAQSAVFK

SEQ ID NO: 866 - protein, 272 aa, synthetic construct
  source 1..272: note = MG160-132 reverse transcriptase
MRPLSYEYSFDIKPGKPVFIQTAESKARGAEIIKLISEAYSPHEIFHHFKRRRGHVGALNKHQQSEWFSRLDLADFFGSVTRTKLSRALRGLGFTDRDAFKMAFDSVVVRGNRKVLPFGFCQSPLLATLALESSALGQKLIEVSNRGIITTVYMDDALLSSDDSASLAGATDEVIAAAAIAEFALAPDKVTINQPVAEIFNCNITRGRRVFTPARMEQFVADLMEANPAGAEAIERYVSTISEAELEHLRARLNPPVQGVRWFADAASGEAS

SEQ ID NO: 867 - protein, 244 aa, synthetic construct
  source 1..244: note = MG160-133 reverse transcriptase
MAVAIPNFRFSYRRKGKPVFVPTTIGERIGREVKKAVEAAYDFDPMFFHLKSGGHVAAMHEHRPNTLFARIDISRFFYSISRRRVQSALDRIGVGNVIFYAKWSTVRNPYGAPRYALPYGFVQSPILASLVVARSALGEHLLALPDSVRATIYMDDITLSSCDQGELQRAFEATLGVLEEDGFQISADKLRPPSPEIDVFNCDLSEGRTAVRDDRIAAFFSKGAGPESEEAFIAYCATVEVGNK

SEQ ID NO: 868 - protein, 247 aa, synthetic construct
  source 1..247: note = MG160-134 reverse transcriptase
MPVAIPNFDYSYLRKGKPVFVPTKIGRRIGNEVKKAVEDAYSFDPIYFHLRRGGHVAAMHHHRDNHFFARIDISNFFYSISRRRVQSALDRIGVGNARFYAQWSTVVSPYADPRYALPYGFVQSPILASLVVATSDLGGQLLGLPASIKVGVYVDDISLSSDDEAGLQQAYNTILGAIASDGLAVSPAKLRPPAGMIDIFNCDLAHGMGRVSGTTGSMPSSLAIPHRTQKMPSSPTALRSRWGTNLR

SEQ ID NO: 869 - protein, 256 aa, synthetic construct
  source 1..256: note = MG160-135 reverse transcriptase
MRNLFDHHFTLKPGTRVYIPTDEGRDRGREITRRVEKAWKAPPNFFHLREGGHVAAARRHKDHPWVASLDLQRFYDQILRSRVHRSLKRIGFDHDDAFEMACDSVVDKKPPQREFSLPFGFVQSPLLASVVFHHSALGHAIRQLKRDGLTVTVYVDDVTLSGETEQAVLSGVQELETAAADSNFAFNEAKKQGPCDEVTAFNIRFGSGTFEIEEARMDAFKRAIEVGSDWSIDGILGYVGAVNQDQFEALVAGTGN

SEQ ID NO: 870 - protein, 265 aa, synthetic construct
  source 1..265: note = MG160-136 reverse transcriptase
MTLPWKDRFQVKPGRWVYIPTPETLEQGRQIKALVTENFQAPPFYYHLHEGGHVAAIQSHTDDRYFLNVDIENFFGAINRSRVTRSLKKRFPYPLAREITVQSTVRVTNEGRYEYHLPYGYPQSTILASICLFDSALGKYLLSLSAQHNVSIYVDDIIISGNDHAELNRISDTLVEKSVASRLPFGRKKVTQVADRITAFNIVLSHQYMQITDQRYNQLLQQALLTDNENVIEGILSYVLSVNPRQHNNMRQELFTLSNTTKTPV

SEQ ID NO: 871 - protein, 212 aa, synthetic construct
  source 1..212: note = MG160-137 reverse transcriptase
MAAIQSHTDDRYFLNVDIENFFGAINRSRVTRSLKKRFPYPLAREITVQSTVRVTNEGRYEYHLPYGYPQSTILASICLFDSALGKYLLSLSAQHNVSIYVDDIIISGNDHAELNRISDTLVEKSVASRLPFGRKKVTQVADRITAFNIVLSHQYMQITDQRYNQLLQQALLTDNENVIEGILSYVLSVNPRQHNNMRQELFTLSNTTKTPV

SEQ ID NO: 872 - protein, 229 aa, synthetic construct
  source 1..229: note = MG160-138 reverse transcriptase
MLFGTALKASIESRWKPPSFYYHLRDGGHVKALQSHISHKFFLHLDISNFFGCINRSRVTRCLKGMYSYRNSRDIALRSTVIHPDLVLNKYILPFGFVQSPIIASLCLAKSRLGRFLAASNRKDSYSVSVYMDDIIVSADDKKELQQLLGEIVPISEKSRFFLNKKKQEGPSKEITAFNIKLTNSVLSVTRERLEEFKKAYKETESLHVLQGIVGYVETVNKEQASELI

SEQ ID NO: 873 - protein, 237 aa, synthetic construct
  source 1..237: note = MG160-139 reverse transcriptase
MFHNVDYRFNGPAGKLVHVPSEKGKYVGSQVRELLADYRWDRFYRHLGRGGHIDILHRHRPNAWFATADVENFFPSVRRNMVAAALRRAGVRESQHFAKWSTVRAPEGGYVLPFGFPASPLLATLVIQESPLGSFLRAAAQAVTVQVYLDDISLSSGEEELLGDVHEGLLLAMAASGFAPSARKTFPPARRVELFNCVLEQGMAAVSAERRAAYDVTGISAERFKTYCRAVERGNWR

SEQ ID NO: 874 - protein, 272 aa, synthetic construct
  source 1..272: note = MG160-140 reverse transcriptase
MLGTYDHKFVLPNGSQVFVPSALGRQVGATMHAAVRRRWRPPRYFYHLRTGGHVGALREHLYNRCFATLDISRFFDSVTRAKIHRALRSIGIAHEQAWEITQQSTVEKTLRQRDFSLPYGFIQSPVLASLALDRSALGRAMKAIARSNHTRLNCYVDDVILSGIEEEAVEDSRLALVAAAQRSGFILNATKSQRPSSTITAFNIVLSNGGLAVTEERMRAFEDAILSSGPVSVAAIIAYVRPINRAQADDLVKVACTSPDMEVRELAASFAT

SEQ ID NO: 875 - protein, 271 aa, synthetic construct
  source 1..271: note = MG160-141 reverse transcriptase
MLGTYDHKFVLPKGSQVFVPSALGRQAGAAVHAEVRRRWRPPHYFYHLRPGGHVAALRGHLHNRCFATLDIGHFFDSITRAKIHRALRSIGIGHDRAWEIAQESTVEKTLRQRDFSLPYGFIQSPVLASLALDRSAFGRAMKTIARSNHTRLNCYVDDIILSDIEEQAVEDSRLALVAAARRSGFVLNETKSQRPHSAITAFNVMLSNGELAVTEKRMHAFVAAIRSSGPAAAAAIIAYVRSINHAQAEELIEVARTSPDGEVRDLAAAYC

SEQ ID NO: 876 - protein, 271 aa, synthetic construct
  source 1..271: note = MG160-142 reverse transcriptase
MLGTYDHKFVLPKGSQVFVPSALGRQAGAAVHAEVRRRWRPPHYFYHLRPGGHVAALRGHLHNRCFATLDIGHFFDSITPAKIHRALRSIGIGHDRAWEIAQESTVEKTLRQRDFSLPYGFIQSPVLASLALDRSAFGRAMKTIARSNHTRLNCYVDDIILSDIEEQAVEDSRLALVAAARRSGFVLNETKSQRPHSAITAFNVMLSNGELAVTEKRMHAFVAAIRSSGPAAAAAIIAYVRSINHAQAEELIEVARTSPDGEVRDLAAAYC

SEQ ID NO: 877 - protein, 249 aa, synthetic construct
  source 1..249: note = MG160-143 reverse transcriptase
MSAPLIENYRFKYKSRGKWIYVPNDRCLQRPKQIIKFFKRDISFPAYFYHYKPGGHVAALHDHLKNDFFSKIDIQNFFYSIARNRVARAFASKGLRGAPTYAKWSTVRSPYENGPRYVLPIGFWQSPHIASLVLMQSPVANAIERARDKGVLVSVYLDDFVGSHGDDALLRDVYGDIQAACVEANLAPNENKLVAPNKAIVAFNCNLTKGLAKVTDERIAKFFSVGRSDIGRQSFEDYLERVERANARA

SEQ ID NO: 878 - protein, 244 aa, synthetic construct
  source 1..244: note = MG160-144 reverse transcriptase
MFQNYKWTWKRNGKIIFAPTQDTDRRGDQIIEFCDREVEFPLCFYHYRKGGHVVALHGHLQNRLFFKIDIQNFFYSISRNRIGAALHHAGFPWARTFAKWSSVKNPYLVGSRYVLPIGFKQSPALASLAMMRSPLMTMVDRAERAGAFVSIYLDDLICSANDEALLQELYEGFLQACEDANLTPNPTKLVPPTSEIVVFNCELRHGFAQVTPERIAKYFEEPRTAASQRSFDVYCAKVSEANTV

SEQ ID NO: 879 - protein, 271 aa, synthetic construct
  source 1..271: note = MG160-145 reverse transcriptase
MLETYDHKFVLPKGSQVFVRSALGRQAGAAVHAEVRRRWRPPHYFYHLRPGGHVAALRGHLHNRCFATLDIGHFFDSITRAKIHRALRSIGIGHDRAWEIAQQSTVEKTLRQRDFSLPYGFIQSPVLASLALDRSAFGRAMKTIARSNHTRLNCYVDDIILSGIEEQAVEESLLALVAAARRSGFVLNEPKSQRPDSAITAFNVVLSNGELAVTEERMHMFEAAILSSGPASAAAIIAYVRSINHAQAEELVDMARTSPDGEVQDFGGCYG

SEQ ID NO: 880 - protein, 271 aa, synthetic construct
  source 1..271: note = MG160-146 reverse transcriptase
MFGTYVHKFVIPKGSQVFVPSALGRQVGEAVHAEVRRRWRPPHYFYHLRPGGHVAALRAHLHNRCFATLDISHFFNSITRAKIHRALCSIGIGHDRAWEIAQESTVEKTLRQRDFSLPYGFIQSPVLASLALDRSALGRVMKTITRSNHTRLNCYVDDVILSGIEEEAVEDSRLALVAAAWRSGFVLNESKSQRPSSAITAFNIVLSNGGLAVAEERMRAFEDAILLSGPASVGAIIAYVRSINRAQAEALVEVAVTSPDGDVRELAATVW

SEQ ID NO: 881 - protein, 247 aa, synthetic construct
  source 1..247: note = MG160-147 reverse transcriptase
MAVQFRNYAYSYEIGNGKPVFAPSERGRKIGLKIKQLVEAKFDPDPFFFHLRRGGHLAALHAHRRHRYFARLDIENFFYGIGRNRVTRALHEIGVDQPRTFGKWSCVRNPYGEPSYALPYGFIQSPLLATLVLARSGVGPVLRELSKRLTVSVYVDDVALSGNNRRVLRRAYRKLTKAVQDAGFTINVDKSAAPGTMIDLFNCHLRHMRTIVTEARRAEFYSRPKGHQSAQGFETYCTSVRRGNANA

SEQ ID NO: 882 - protein, 334 aa, synthetic construct
  source 1..334: note = MG160-148 reverse transcriptase
MRDGKFRPALTKLPSQAKEMVPCARARLGAFLVASRPYLPNGVGAGFTSPQLSSSFESMRNVARSFVKDGTRYYVLTKSYAGWRTFSEGSDAAMAGEEEWRLLKERVLSHWQPKAVFTAFSKRAHIAALRPHLENKCFATIDLKGFFDCVTRTKVCRALESIGFARSAAFKVAGESTIRQGDKYTLPRGFRQSSLLATLVLEKSLFGSALVGNRFESRITVYSDDIIFSSNDPEVLADEHSQAIELLRRSNFPINATKTQTVRTEVSIFNLRMSHRTLRFTDERMWKFLEQAARFVKGEDAEHDLHLYEKLFGDYIRSINPEQEKRLRTSLGLP

SEQ ID NO: 883 - protein, 271 aa, synthetic construct
  source 1..271: note = MG160-149 reverse transcriptase
MLETYDHKFVLPKGSQVFVPSALGRQAGAAVHAEVRRRWRPPHYFYHLRPGGHVAALRGHLHNRCFATLDIGHFFDSITRARIHRALRSIGIGHGRAWEIAQESTVEKTLRQRDFSLPYGFIQSPVLASLALDRSAFGRVMKTVARSNHTRLNCYVDDIILSGIEEQAVKESRLTLVAAARRSGFGLNKDKSQRPDSAITAFNVVLSNGELAVTEERMHAFEAPIRSSGPASAAAIIAYVRSINHAQAEELIEVARTSPDEPSATCVLSGR

SEQ ID NO: 884 - protein, 244 aa, synthetic construct
  source 1..244: note = MG160-150 reverse transcriptase
MIVNYDFKYRSRGKWFFVPNEKCERRGRRMLAFFKKRVAFPDYMYHFKKGGHVAALHAHLNNKLFFKIDIQNFYYSIARMRVTRALRYWRYPGAGAFSMWSCVKNPLPGPPHALPIGFVQSPLLASLVLMKSEVADAIDRAIAKGVCISVYLDDFIGSHDDPAVLTEAYEDIRVTCVTAGLIPNPRKLVAPSVAITAFNCDLKQGSALVTPARVAEYLARPDRTALSDAGFVQYAGLVSSQNVP

SEQ ID NO: 885 - protein, 244 aa, synthetic construct
  source 1..244: note = MG160-151 reverse transcriptase
MLENYKDKYTSRGKFIFIPTPECDRRAERLLRFAEDIELPPYFFHYRRGGHVEALHQHIKNRYFFRIDLKNFFYSISRNRVNRILRQSGFHSAREWSEWSTVRNPYNDGPKYVLPIGFKQSPLLASLALWRSAVASSIEEAADRGVFVSVYFDDLIGSSNDEDELRTTYAGILAACEQANLVANEAKLIEPANAIIAFNCHLTHGQANVTEERIQKFIDEARGPNAETSFIDYCIRVQRLNHAA

SEQ ID NO: 886 - protein, 163 aa, synthetic construct
  source 1..163: note = MG160-152 reverse transcriptase
MLPCNEHLNNALFFKIDIQNFYYSIARMRVTRALRDWRYPGAGTFAKWSCVVNPGSGPKFSLPIGFVQSPLLASLVLMKSPVNDAIERARANGVYISVYLDDFIGSHNDLAVLTAAYEDIRDTCVAASFIPNPGKLVPPRTAITAFNCDLTNGSALVTADRIN

SEQ ID NO: 887 - protein, 244 aa, synthetic construct
  source 1..244: note = MG160-153 reverse transcriptase
MIENYKFKYRSRGKWFFVPNDKCERRGRRMLQFFKKRVVYPNYMYHFKKGGHVAALHAHLNNTLFFKIDIQNFYYSIARMRVTRALREWHYPGAGTFSIWSCVRNPGPGPKHALPIGFVQSPLLASLVLMKSPVHDAIERARANGVCISVYLDDFIGSHNDLAVLTGAYEDIRDTCVAAGLIPNPGKLVAPQAAITAFNCDLTNGSALVMADRINKYLASPNRTVMSDAGFAHYQTMVASKNVP

SEQ ID NO: 888 - protein, 245 aa, synthetic construct
  source 1..245: note = MG160-154 reverse transcriptase
MAVAFENYLYSNPTEKGKPYFVPTDRCRRIGAETMTLVRARVKFEHHYYHFSKGAHVAALHAHRAHRYFARLDIQNFFYSVGRNRVKSALKDIGVPYAEHFAKWSTVRNPYDDPRYALPYGFVQSPLLASLVLRQSAIGTAIRDLPVRIKRSVYLDDIALSANKRDDLEEAFETVIAAVEAANFTLNEAKVIGPSTDITLFNCDLSSGMTKVSDPRIAKFYDAPASEESVAGFEAYLASVEAGNR

SEQ ID NO: 889 - protein, 246 aa, synthetic construct
  source 1..246: note = MG160-155 reverse transcriptase
MYQAAKIENYDYKYRSRGKWIFVPNERCKRKGERILSYFSRVKFPSYFYHYQPGGHVAALHAHLQNSLFFKIDIQNFYYSIARMRVTRVLRNRGFVGAHTAARWSCVANPLAGPRHVLPIGFLQSPLLASLVLLKSPVADAIERALDDGVCISVYLDDFIGSHNDNSVLTAAYDNIRHACVGAGLIPNAGKLVPPNAAITVFNCDLVHGAAQVTEARVNEFMEKPRNDISTAAFQAYRQRVASQNL

SEQ ID NO: 890 - protein, 244 aa, synthetic construct
  source 1..244: note = MG160-156 reverse transcriptase
MFVNYEFKYRSRGKWFFVPNDKCERRGERMLAYFKRRVAFPDYLYHFKKGGHVAALHTHLNNHFFFKIDIQNFYYSIARMRVTRALRQWGYPGANTFAMWSCVRNPLPGPKHALPIGFVQSPLLASLVLMKSDVAEAIDRARAKGVCISVYLDDFIGSHDDEALLTAAYEDIRATCVAAGFIPNSGKLVPPQAAITAFNCDLTNGSAEVTAVRIAKYFGRTDRTPLSDAGFDEYRDLVKSRNTP

SEQ ID NO: 891 - protein, 219 aa, synthetic construct
  source 1..219: note = MG160-157 reverse transcriptase
MHLANQIFATLDICGFFDSVTRSKIHRALRRIGVQQEPAREIAQRSTVEKTDGRRNFSLPYGFVQSPILASPALDKSGLGRVMKAVARSNHTKLTSYVDDIILSGIEEDAVEASRLALIAAAQNSGFAINIDKSQRCASEVTAFNIRLSNGSMAITERRMQEFETALERSDPRKAVGIVSYVRSVNHSQAEELAKQIMAFPEGEVRDAVLELAANWPMN

SEQ ID NO: 892 - protein, 245 aa, synthetic construct
  source 1..245: note = MG160-158 reverse transcriptase
MITNYQFKYRSRGKYFFVPNEKCERRGRRMLAFFKKRVRFPDYMFHFRKGGHVAAMHAHLHNRLFFKIDIQNFYYSIARMRVTRALRHWGYPGANTFAMWSCVLNPGPGPRHALPIGFVQSPLLASLVLMQSDVAQAIERAIAEGVCISVYLDDFIGSHDDEAVLTQAYEDIRDTCVAAGLIPNPNKLVAPTEAITAFNCDLTNGSASVTVARQQKYLTSPDRTPMSDAGFSEYVALVESQNTVP

SEQ ID NO: 893 - protein, 264 aa, synthetic construct
  source 1..264: note = MG160-159 reverse transcriptase
MQHTFSHKFETATGVLVHVPTKYGLTRGYEIVDAVLARWRPPAYFYHFRPGGHVAACRHHLTNPCFARLDIKSFFGSVTRTKVHRALRRIGVSQDDAFAFASTSTVLREGERGRYALPFGFVQSMVLASVALDRSLVGQRLLAAHRPHIKVSVYVDDIILSARQMAPLLEYVNVLVATANAAGFQFNPSKTLEPSIFTEAFNINVSQGTMCVTSERLAVFEREMHGQNRSRIDAVIAYVGTVNKAQAAQLSQCLEGRERQTAAP

SEQ ID NO: 894 - protein, 273 aa, synthetic construct
  source 1..273: note = MG160-160 reverse transcriptase
MRGTYDHKFVLPKGQQVFVPSAPGRQAGALVHDEVRRRWRTRTPPYFYHLRSGGHVAALKAHVHNRCFATLDIHHFFDSVTRAKVHRALRSIGVGHSRAWEIVQESTVEKHRKHHDFSLPYGFVQSPILASLALDRSALGRAMKTVARSNHTRLSCYVDDVVLSGIEEEAIESSRLALIEAAQTSGFALNDDKSQRPGREVTAFNIVLSNGALAVTQRRMQEFEDDILASGALVVAGIIGYVYSVNRAQAAELVSIAQTSPDEAVRDAADKYS

SEQ ID NO: 895 - protein, 244 aa, synthetic construct
  source 1..244: note = MG160-161 reverse transcriptase
MLENFRHKYLSRGKFIFVPTPECDRRAERLLRFAEGIELPPYFFHYRRGGHVEALHQHLANRYFFRVDLKNFFYSISRNRVNRILRQSGFRSAREWSEWSTVRNPYNDGPKYVLPIGFKQSPLLASLALWRSAVASSIEEAGDRGVFVSVYFDDLIGSSNDESELRITYEGILAACAQSNLVANEAKLIEPANAIVAFNCHLAHGQANVTEERIQKFIDEARGPHAETSFIDYCIRVQRFNHAA

SEQ ID NO: 896 - protein, 253 aa, synthetic construct
  source 1..253: note = MG160-162 reverse transcriptase
MLYNFEYSFPIEGKRRVFVPTLESRAFGETLCRRVLRRWTPPDYFFHFQRGGHVAATRVHLGSHLFVRLDLRRFYDSVTRTKVHRALCLCRFRHHFAWDAACQSTVRKSGRGAPFSLPFGFVQSPVLASLALGVSSLGTALAQTHHGGLALSVYMDDILISGHDAKALSAARSRLETAAAQSGFEFHPLKSFGPASALEVFNLALGHESLEVTASRLADFKTAILEGDPATVAGILGYVGTVNRAQRGLLAGL

SEQ ID NO: 897 - protein, 246 aa, synthetic construct
  source 1..246: note = MG160-163 reverse transcriptase
MAVPLHNYEFSYRNSKGKPVFVPTKKTRSIAREIYREVGLRFEAKDHFYHLRKGAHIAALHAHRAQTYFARIDLKNFFYSVGRNRVKAALKAVGVPSPERYARWSCVRNPYRRPSYALPYGFPQSPLLATLVLQSSALGAAIEAMPPEIFRSVYLDDVAISANDLGALEFAFQRLLGAVEHGNFVLNEGKVVGPAKQIEIFNCELARGHAEVTEKRVSEFYATPRSAESVAGFETYRASVAVGSAI

SEQ ID NO: 898 - protein, 244 aa, synthetic construct
  source 1..244: note = MG160-164 reverse transcriptase
MLQNFKWTWKRKGKFIFAPSKDADRRGDQIIEFCARNVDFPLCFYHYRKGGHVLALHGHLQNQFFFKIDIQNFFYSISRNRIAAALHKAGFPWARTFAKWSSVRSPYDVGPRYCLPIGFKQSPALASLVLMRSPLMAMVERAEEAGAFVSIYLDDLICSGNDEAVLHELYEEFLAAFEEANLVPNPTKLVSLTDEIIVFNCELRHGFARVTQERIQEYLEVPRTAASQISFATYCAKVAEANIV

SEQ ID NO: 899 - protein, 272 aa, synthetic construct
  source 1..272: note = MG160-165 reverse transcriptase
MIEPHGITVESLAENLELSTAECYKLSRAAHRLYRTSLHPKPSGGTRVIEAPFPRLKAVQRALSEKILNKIPVHSCFHGRPGTSQLSAARIHVRQPMLITMDVKDFFPSVTARMVGSALLKLDFQLPVIEEMVRLCTRKRRLPQGALTSPVLARIVLSPILLEIEVLFANISPHCKVTQFVDDLAFSGPSGIQRLIPTIHRLWTRHGFEVHPKKTKVMRADESQEVLGVWVNNGLAPTAEFLQRVEEARRTLPLDDQKRLGLENWLSEIQRK

SEQ ID NO: 900 - protein, 255 aa, synthetic construct
  source 1..255: note = MG160-166 reverse transcriptase
MQKFYDHFFESRLKPGQLIFVQTEAEAKIGRGLIESVRRRWFIPPYFYHLKAGGHIAALQIHKSDRYFARQDLTSFFGSVSRNKVCQTLKKIGFSFFDANAIAHRSCVMLDGKRTLPYGYVQSPVLASVVLDKSALGQELKRLHASEVNVSVFMDDITLSHATSLDPLHAAVAALSKSAEASRFVISKDKAQGPSELVTAFNIDVQSEALTITRSRYEELAERISAQGKCPSTDGILGYVRQINPHQFSQLRDLA

SEQ ID NO: 901 - protein, 244 aa, synthetic construct
  source 1..244: note = MG160-167 reverse transcriptase
MFQNFKWTWKRNGKTIFAPTKDTDWRGDKIIEFCDREVEFPVCFYHYRKGGHVVALHGHLQNRLFFKIDIQNFFYSISRNRVAAALHHAGFPWARTFAKWSAVKNPYPVGSRYVLPIGFKQSPALASLVMMRSPLMAMVDRAEGAGAFVSIYLDDLICSANDEALLQELYEGFLKACEDANLTPNPTKLVAPTSEIVVFNCELRHGFAQVTPERIAKYFEEPRTAASQRSFDVYCAKVSEANTV

SEQ ID NO: 902 - protein, 204 aa, synthetic construct
  source 1..204: note = MG160-168 reverse transcriptase
MPSKWSNRFEIKAGRWVYVPTSEARREGIEIKRCIAARWHPPEYYYHLRKGGHVAAIQSHLGNSHFIRFDIQDSFGSINRTRVTRCLKPLVPYSEARAWANSSTVRDPVFKGKTHLPYGFVQSQMLASICLYRSALGTYLHRIHGKNGVVVCVYVDDVIVSACDVDELKVIYSQIQVASARSRLKLSQDKAPRPLRRCPPLTSF

SEQ ID NO: 903 - protein, 312 aa, synthetic construct
  source 1..312: note = MG160-169 reverse transcriptase
MSWQYCSSKDFPKIFTEKNFFFLLDIKKAEFLQIAAEKITHYRKWKKVKSDGVKYREIYNPDRKLKYLLKKLSKRYLSKFNYPPFAHCGPKGRSIITACRGHERFIHHVSLDIESFFDRVSKLVVERTLLAVGVNKTIEKLIVDISVEDNRLPQGFPTSSLLSALVVSLALRDFYTEFESKELQLSLYADDILISSNNKQLLLDAERYIAEKLEAIKLSLNPDKKTEGTGTKFLWLSLRIHPKIALPRKNLRDLQKSVYAHKTTGAIPKGFKPKKRGDLKKQWKLSVKGKIDFAQSVNKNKLLEKISRDSQQ

SEQ ID NO: 904 - protein, 254 aa, synthetic construct
  source 1..254: note = MG160-170 reverse transcriptase
MSRRWKHKFELKPGCWVFVPEEEAIQQGRKIKQEIESAWRRPEYYFHLTAGGHVAALKSHLNSDVFIRADIHQFFNQINRSRVARNLKNIFRSYKKAINYADDSVVRLPNCKAKKYILPFGFVQSAIIASLCFRFSALGIFLEHLRKSGFVVSVYMDDIIISSRCPIDEMEDVYRNLTTIAIKSGFALNLEKMNGPSTDITAFNIELSNGKLAITKKRLSAFESILAESKNPYQIDGILGYIKTVCPAQAFCFE

SEQ ID NO: 905 - protein, 283 aa, synthetic construct
  source 1..283: note = MG160-171 reverse transcriptase
MTPTEQIVELLSKYPSEGKAVRIFQNKPDGGRRPITKPNKSLNKWLKHMNKILSKQFNGWPLFMHGGIKKRSYVSYAKPHVMQQCLITIDIRKCFDSISTNDIASSLEEHLKLPRDVCIDLASKLCYRCKLAQGFATSNYISNLYLLNPLTLLFNDLQKEGIVFTNYVDDLAISGDLERTDEIINLVAVSLSRAKLAINKAKIKVMPSTGQQIICGLIVNRRLSLTRALKLKLLSDVANNRISQSSAEGWISNLNSFDKKFRDKFYKFAIKKGLIKTKARKYK

SEQ ID NO: 906 - protein, 245 aa, synthetic construct
  source 1..245: note = MG160-172 reverse transcriptase
MPVSFENYTHSFLLNRKHIFAPSERGRRIGEDVKQRVESAVSFEDYYYHLRKGGHVAALHSHRANAHFCKIDIKNFFYSVERNRVVRALRRIDVHRATHYGKWSCVRNPFGDPKYALPYGFVQSPILATLVLATSEIGRTLRLMASDVTVAVYVDDISLSSSDPVRLKARYDELLDAVDAAGFTVNAEKCVAPCSDMTVFNCSLRSGETVVTSDRAAEFHMFPPSPESLAGFERYCASVERGNTK

SEQ ID NO: 907 - protein, 245 aa, synthetic construct
  source 1..245: note = MG160-173 reverse transcriptase
MPVSFENYTHSFLLNRKHIFAPSERGRRIGEDVKQRVESAVSFEDYYYHLRKGGHVAALHSHRANAHFCKIDIKNFFYSVERNRVVRALRRIDVHRATHYGKWSCVRNPFGDPKYALPYGFVQSPILATLVLATSEIGRTLRLMASDVTVAVYVDDISLSSSDPVRLKARYDELLDAVDAAGFTVNAGKCVAPCSDMTVFNCSLRSGETVVTSDRAAEFHMFPSSPESLAGFERYCASVERGNTK

SEQ ID NO: 908 - protein, 245 aa, synthetic construct
  source 1..245: note = MG160-174 reverse transcriptase
MPVSFENYTHSFLLNRKHIFAPSERGRRIGEDVKQRVESAVSFEDYYYHLRKGGHVAALHSHRANAHFCKIDIQNFFYSVARNRVVRALRHIDVHRATHYGKWSCVRNPFGDPKYALPYGFVQSPILATLVLATSEIGRTLRLMASDVTVAVYVDDISLSSSDPVRLKARYDELLDAVDAAGFTVNAGKCVAPCSDMTVFNCSLRSGETVVTSDRAAEFHMFPPSPESLAGFERYCASVERGNTK

SEQ ID NO: 909 - protein, 245 aa, synthetic construct
  source 1..245: note = MG160-175 reverse transcriptase
MPVSFENYTHSFLLNRKHIFAPSERGRRIGEDVKQRVESAVSFEDYYYHLRKGGHVAALHSHRANAHFCKIDIKNFFYSVERNRVVRALRRIDVHRATHYGKWSCVRNPFGDPKYALPYGFVQSPILATLVLATSEIGRTLRLMASDVTVAVYVDDISLSSSDPVRLKARYDELLDAVDAAGFTVNAGKCVAPCSDMTVFNCSLRSGETVVTSDRAAEFHMFPPSPESLAGFERYCASVERGNTK

SEQ ID NO: 910 - protein, 245 aa, synthetic construct
  source 1..245: note = MG160-176 reverse transcriptase
MPVSFENYTHSFLLNRKHIFAPSERGRRIGEDVKQRVESAVSFEDYYYHLRKGGHVAALHSHRANAHFCKIDIKNFFYSVERNRVVRALRRIDVHRATHYGKWSCVRNPFGDPKYALPYGFVQSPILATLVLATSEIGRTLRLMASDVTVAVYVDDISLSSSDPVRLNARYDELLDAVDAAGFTVNAGKCVAPCSDMTVFNCSLRSGETVVTSDRAAEFHMFPPSPESLAGFERYCASVERGNTK

SEQ ID NO: 911 - protein, 253 aa, synthetic construct
  source 1..253: note = MG160-177 reverse transcriptase
MHPKWSSKFELKPGKWIFVPTAETVIEGRKIKLAIKKKWKPPSYYFHLKAGGHVEALRTHMEHDNFLRIDIRDFFGSINRTRVTRCLKDKFGYGIARSYANASTVPDPVVPKRFIIPFGFVQSQIIAAVCLEESALGIYLNNLSSNPAIALTVYVDDIIVSTSDKVLLDQVLTDIEVAAKRANFTLNADKQEGPAAAITAFNIVLAKDSMVVDASRMKKFEEAFATATSESQRAGIKSYVTSVNASQALATFP

SEQ ID NO: 912 - protein, 245 aa, synthetic construct
  source 1..245: note = MG160-178 reverse transcriptase
MPVSFENYTHSFLLNRKHIFAPSERGRRIGEDVKQRVESAVSFEDYYYHLRKGGHVAALHSHRANAHFCKIDIQNFFYSVARNRVVRALRHIDVHRATHYGKWSCVRNPFGDPKYALPYGFVQSPILATLVLATSEIGRTLRLMASDVTVAVYVDDISLSSSDPVRLKARYDELLDAVDAAGFTVNAGKCVAPCSDMTVFNCSLRSGETVVTSDRAAEFHMFPSSPESLAGFERYCASVERGNTK

SEQ ID NO: 913 - protein, 252 aa, synthetic construct
  source 1..252: note = MG160-179 reverse transcriptase
MTPSDQWLYKFKRKSGWVFVPTPDTLAYGKEIKVLIEKRWKAPAYYYHLRQGGHVAALQQHSSNEYFLHLDIKSFFGHINATRITRCLKGMFSYVKAREIAIHSTVHHPKAKHLSILPFGFVQSPIIASVCLRMSTLGNCLHELHKQAGMEVSVYMDDIILSSNNLDDLKKALEKVEQASERSILPLNKKKQEGPDRMVTAFNIKLSRNNLDITAERLGEFQSIYHASPNPNQKAGILHYVKTVNASQAAMF

SEQ ID NO: 914 - protein, 245 aa, synthetic construct
  source 1..245: note = MG160-180 reverse transcriptase
MPVSFENYTHSFLLNRKHIFAPSERGRRIGEDVKQRVESAVSFEDYYYHLRKGGHVAALHSHRANAHFCKIDIQNFFYSVARNRVVRALRHIDVHRATQYGKWSCVRNPFGDPKYALPYGFVQSPILATLVLATSEIGRTLRLMASDVTVAVYVDDISLSSSDPVRLKARYDELLDAVDAAGFTVNAGKCVAPCSDMTVFNCSLRSGETVVTSDRAAEFHMFPPSPESLAGFERYCASVERGNTK

SEQ ID NO: 915 - protein, 245 aa, synthetic construct
  source 1..245: note = MG160-181 reverse transcriptase
MPVSFENYTHSFLLNRKHIFAPSERGRRIGEDVKQRVESAVSFEDYYYHLRKGGHVAALHSHRANAHFCKIDIKNFFYSVARNRVVRALRHIDVHRATHYGKWSCVRNPFGDPKYALPYGFVQSPILATLVLATSEIGRTLRLMASDVTVAVYVDDISLSSSDPVRLKARYDELLDAVDAAGFTVNAGKCVAPCSDMTVFNCSLRSGETVVTSDRAAEFHMFPPSPESLAGFERYCASVERGNTK

SEQ ID NO: 916 - protein, 268 aa, synthetic construct
  source 1..268: note = MG160-182 reverse transcriptase
MTLPWKDRFQVKPGRWVYIPTQDTLEQGQQIKALVAEKFTAPSFYYHLQEGGHVAAIQSHVDDQYFLNVDIENFFGVINRSRITRSLKKRFPYGQAREITVQSTVRVTNEGRYEYHLPYGYPQSTILASICLFDSALGRYLHFLSAHHNVSVYVDDIIISGNDLKELQQVSDTLVEKSVASRLPFGRKKAPQVSEKITAFNIELSQHTTKLTNKRYVELRQQALLTDNENVISGILGYVSSVNRSQHYTMRKEIFTLNHKAKTPVETD

SEQ ID NO: 917 - protein, 292 aa, synthetic construct
  source 1..292: note = MG160-183 reverse transcriptase
MFLSIIGRHIQEIMEKIELLEKLLSEYPADAAVFCASEPKSDGTFRPIVKPNKPLSDWLKRVKRALYQQRKDWPTFIHGGVKKRSYISFARPHTNKNTVITVDIRDCFGSISQNNVQIALIEKLGLPNGLACRLATKLCHKRRIPQGFATSSYLTNLYLNDTLLIIKRQMSRMGVDMTIYVDDIALSSQHIDSAKVINIVSQELSRAELAISKAKVKVMHSHGPQIICGLIVNKRISLTRQKKKELFSDIANGRMSEASLSGWLANLNMIDKELMRKLHTYAIKNGNMKLGA

SEQ ID NO: 918 - protein, 274 aa, synthetic construct
  source 1..274: note = MG160-184 reverse transcriptase
MLEKLLSEYPADAAVFCASEPKSDGTFRPIVKPNKPLSDWLKRVKRALYQQRKDWPTFIHGGVKKRSYISFARPHTNKNTVITVDIRDCFGSISQNNVQIALIEKLGLPNGLACRLATKLCHKRRIPQGFATSSYLTNLYLNDTLLIIKRQMSRMGVDMTIYVDDIALSSQHIDSAKVINIVSQELSRAELAISKAKVKVMHSHGPQIICGLIVNKRISLTRQKKKELFSDIANGRMSEASLSGWLANLNMIDKELMRKLHTYAIKNGNMKLGA

SEQ ID NO: 919 - protein, 267 aa, synthetic construct
  source 1..267: note = MG160-185 reverse transcriptase
MNTEITEERLAKSLNLSLNELREWISCAHKSYGRMVIIKPNGKRRIIYPPTKQLKFIQRKLLRNILSKIPTPQEMCSGKGKSTKDIMQKHVNKNMLIRIDLSDFFPNIKAHRIFTLLRERGFSQRVARIITKLTTFRGSLPQGSPCSPQLACLALAPAAKHIINLFQFPVSITFYVDDIIISGSSSIQNFRETIYDILERNGFVVNRAKTKIMPKGTEQSALGLRVDHGKVEPDSQFMEKYQKARHENANSESIRGMRKYLKYIISK

SEQ ID NO: 920 - protein, 335 aa, synthetic construct
  source 1..335: note = MG160-186 reverse transcriptase
MRFISQTFRRIKMNHRYCRIIFAGYYTVKFLNELIDLLVKILTLFNYFLPKKQMSFPLWSHRYKSKKGKWIYIPTDECRIKGANIIRLLSTFWHSPSYFYHLQKGSHIAALKLHLYNGSDLRQIKNSRYFSYFDITNFFGSINKNKIIKATKCFVGYQMAKDIANASTVTNIGSSEKVLPFGFVQSPLIGSIVLDQSYLGRELSKLSKLHNLKLSVFVDDIIISSDNKKLIQSASERILKAIEKSNLHLNQEKSSICNGSMKVFNIFAKYNCLYLTEHRLTVFAEKLINNSSDYFVVEGIVNYMKMVSPHQSKRLIKEIVCEIGTSRAGFIAKIP

SEQ ID NO: 921 - protein, 181 aa, synthetic construct
  source 1..181: note = MG160-187 reverse transcriptase
MRRHVNKNMLIRIDLSDFFPNVKAHKIFTLLRERGFSLEVARIITKLTTFRGGLPQGAPCSPQLACLALAPAAKHIINLFKFPVSISFYVDDIIISGSGSIQNFRETIYAILERNGFIVNREKTKIMPKKAEQAALGLRVDHGVVEPDSQFMNKYRNARNGGAKPESIRGMKKYIEYINSK

SEQ ID NO: 922 - protein, 282 aa, synthetic construct
  source 1..282: note = MG160-188 reverse transcriptase
MSFPLWSHRYKSKKGKWIYIPTDECRIKGANIIRLLSTFWHSPSYFYHLQKGSHIAALKLHLYNGSDLRQIENSRYFSYFDITNFFGSINKNKIIKATKCFVGYQMAKDIANASTVTNIGSSEKVLPFGFVQSPLIGSIVLDQSYLGRELSKLSKLHNLKLSVFVDDIIISSDNKKLIQSASERILKAIEKSNLHLNQEKSSICNGSMKVFNIFAKYNCLYLTEHRLTVFAEKLINNSSNYFVVEGIVNYMKMVSPHQSKRLIKEIVCEIGTSRAGFIAKIP

SEQ ID NO: 923 - protein, 282 aa, synthetic construct
  source 1..282: note = MG160-189 reverse transcriptase
MSFPLWSHRYKSKKGKWIYIPTDECRIKGANIIRLLSTFWHSPSYFYHLQKGSHIAALKLHLYNGSDLRQIKNSRYFSYFDITNFFGSINKNKIIKATKCFVGYQMAKDIANASTVTNIGSSEKVLPFGFVQSPLIGSIVLDQSYLGRELSKLSKLHNLKLSVFVDDIIISSDNKKLIQSASERILKAIEKSNLHLNQEKSSICNGSMKVFNIFAKYNCLYLTEYRLTVFAEKLINNSSDYFVVEGIVNYMKMVSPHQSKRLIKEIVCEIGTSRAGFIAKIP

SEQ ID NO: 924 - protein, 282 aa, synthetic construct
  source 1..282: note = MG160-190 reverse transcriptase
MAPQEYTLCQLANNLGFTTVQTLQAFAKKAPSCYGRVVIPKDKQNPTKGLREINPPTEELKQIQRLLLEKVLYHINTLDNMGAGRGSSTAKIMALHTKKDMMLCYDISNFFPSVKKWTIKRCLRDRGFPWDVIDVIANLTTFNNHLPQGGPCSTQLGKIIISPPAKHLLRLLKNYGTAVDVSFWVDDIIISGPRSLKNLEKSDNVYNIFSRYGFQLKREKTKIQPKTDEQNALGLRVDRGIVESDSEFICSYSTEISLNGCNSKRAKGMRNYMKSVRKKIMR

SEQ ID NO: 925 - protein, 282 aa, synthetic construct
  source 1..282: note = MG160-191 reverse transcriptase
MSFPLWSHRYKSKKGKWIYIPTDECRIKGANIIRLLSTFWHSPSYFYHLQKGSHIAAIKLHLYNGSDLRQIKNSRYFSYFDITNFFGSINKNKIIKATKCFVGYQMAKDIANASTVTNIGSSEKVLPFGFVQSPLIGSIVLDQSYLGRELSKLSKLHNLKLSVFVDDIIISSDNKKLIQSASERILKAIEKSNLHLNQEKSSICNGSMKVFNIFAKYNCLYLTEHRLTVFAEKLINNSSDYFVVEGIVNYMKMVSPHQSKRLIKEIVCEIGTSRAGFIAKIP

SEQ ID NO: 926 - protein, 279 aa, synthetic construct
  source 1..279: note = MG160-192 reverse transcriptase
MGKIELLEKLLSEYPADAAVFCASEPKSDGTFRPIVKPNKPLSDWLKRVKSALYQQRKDWPTFIHGGVKKRSYISFARSHTNKNTVITVDIRDCFGSISQNNVQTALVEKLGLPNGLAHRLAAKLCYKRRIPQGFATSSYLTNLCLNDTLLIIKRQMSRISVDMTIYVDDIALSSQYIDSAKVINLVSKELSRAGLAISKAKVKVMHSYGPQIICGLVVNKRISLARQKKKELFSDIANGRMGEASLRGWLANLNMVDKELMEKMKNYAIKKGLLQTST

SEQ ID NO: 927 - protein, 244 aa, synthetic construct
  source 1..244: note = MG160-193 reverse transcriptase
MPVKFENYTHSFRLNGKPVFAPSDLGRRIGEDLKQRVENAFVFPDYFFHLRKGGHVAALHSHRENTHFCKVDIENFFYSVARNRVVRALRATGVPRAAHYGKWSCVQNPYGHPSYALPYGFVQSPILATLVLATSEVGRALRRMSKDTTIAVYVDDISLSSNDHTQLAARYDELLEAIGLAGFTANKGKCVAPCSDLTVFNCSLQKGETAVTPDRVAEFHTTLPSPASLAGFEHYCQSVERGNS

SEQ ID NO: 928 - protein, 266 aa, synthetic construct
  source 1..266: note = MG160-194 reverse transcriptase
MSVRFQNFTYTHSRAGKPIYVPNEKGRRLGEEIKRSVEKNVDFDDFYHHLRRGGHVRSLHLHKRNTYFARIDIERFFYSIGRNRVVRSIREAGISSPSKYGRWSCVRNPYKDPTYSLPYGFVQSPILASLVLLKSSAGKGLREMNRSITVSVYMDDISISSDSLSDLEAAYADLKGVIVESGFAINESKARAPSPTMDVFNCDLSQGEAVVQKARIDEFYSVARSEESKAGFERYRASVERGNGLTVSPLELDDDLEALIRFVLSA

SEQ ID NO: 929 - protein, 260 aa, synthetic construct
  source 1..260: note = MG160-195 reverse transcriptase
MDLGLRNYEYSYRNAKGKPVFAPSVKGREIGQKVKKLVTEAVDFDGIYYHLRSGGHVSALHVHRENEWFSRIDLKNYFYSISRNRINRELRRIGIRHHERFAKWSTVKNPYKLPSYSLPYGFVQSPILATLAFQNSAVGTLLRDMASEIAVSVYLDDIGLSSSNLALLQKVHRATLEAVEESNFVVNLDKTAEPASEMVLFNCDLAHASANVRAERIDEFFSIERSEPSASAFLAYCEAVSAGNLTPGVDAAGVDRGHSG

SEQ ID NO: 930 - protein, 245 aa, synthetic construct
  source 1..245: note = MG160-196 reverse transcriptase
MIVNYEFRYPSRGKWFFVPNEKCERRGRRMLQYFKKRVVFPDYMYHFKKGGHVAALHAHLNNQLFFKIDIQNFYYSIARMRVTRALRHWGYPGAGTFSMWSCVRNPLPGPKHTLPIGFVQSPLLASLVLMKSEVADAIKRATANGVCISVYLDDFIGSHNDQAVLTTAYEDIRDTCVAAGLIPNPGKLVPPQAAITAFNCDLRSGSAEVTAERVAKYFARTDRTHLSDSGFDHYRDLVRAQNTAP

SEQ ID NO: 931 - protein, 272 aa, synthetic construct
  source 1..272: note = MG160-197 reverse transcriptase
MRHNYEYSFEIKPGKPVYIQRKDALERGLALTAEVEEQYQPNPLFYHFKRRGGHVAAMRVHTANSHFSRFDLEDFFAHVTRTKIVRALLNLGWAPREAFEDASDSVVVRAGAKVLPFGFHQSPLLATLVLEQSALGKFLIGLAAEGLTVSVYMDDILISSNDRDRLEAVSDELVSIATDAGFPLSTSKSAVAMEEAEVFNCLLSEQKIRFLDRRMAKFIADHGVASEAGQLAIQGYIRAVSNDEHEVFLARLAQPVDAAQDGVTVRWFGDAK

SEQ ID NO: 932 - protein, 248 aa, synthetic construct
  source 1..248: note = MG160-198 reverse transcriptase
MFVPTPEEVLFGNYLKSDLERLWDPPGYYYHLQSGGHLAALGVHTCMPHYLRLDIKNFFGCINRTRVTRHLKKYYPYKKARTYADRSTVRLPNSEPLTYILPFGFVQSPLLASLSLRNSKLGRVLDDAAKSSMFNVSVYVDDLLVSSQDKAALQDKAEEIIGAANKAGFVINEEKSSGISSEVEAFNICLSPQGLAIIEPRMRAFLKSLENANSMDKVRGIINYVRRVNTHQAEQLWNYFNEQNYRRS

SEQ ID NO: 933 - protein, 241 aa, synthetic construct
  source 1..241: note = MG160-199 reverse transcriptase
MSLQDLTLVSSDSKASGIKIKSAIEDCWTPPDNYYHLRNGGHVAAMKAHCSNTCFIHLDIKNFFGAINKSRVTRCLKRHFGYSDARLIARESTVKHPTNPKKYILPFGFVQSPIIASICLFKSSLGKHLNKLSFTKDVVVSVYMDDIIISMEDEDMADDILCEVKCAADKSRLPLNEIKEEGPADQVTAFNINLSHKNLKIDDVRLSEFIDNFTLSGNDAQRKGIRQYIKSVNTDQSQKLV

SEQ ID NO: 934 - protein, 257 aa, synthetic construct
  source 1..257: note = MG160-200 reverse transcriptase
MHESFESRWTSRFEIKLNAWVFVPTPEFIEYGTKVKQAITEKWRSPNYYYHLRSGGHVQALKKHTKHQYFIHLDIQNFFGQINRSRATRCLKEHFSYSEARTIAIKSTVALPRSTKKKYILPFGFVQSAIVASLCLHKSTLGKYLLYLAKQNNLAVSVYMDDIIISSDNQQQLEEVLASVEVAAEKAGFPLNKTKQEGPCDQITAFNILLTGNGLKITEKRLNEFVEVFKASTNPNQKDGILNYIKCISIKQVSLLK

SEQ ID NO: 935 - protein, 235 aa, synthetic construct
  source 1..235: note = MG160-201 reverse transcriptase
MPTPEFIEYGTEIKQIIAKRWCSPNYYYHLRNGGHVSALKKHLKHQYFIHLDIQNFFGQINRSRATRCLKEYLSYSEARTIAIKSTVALPRSDKKKYILPFGFVQSTVIASLCLHKSTLGKCLHQLAKQNDLSVSVYMDDIIISSNNLQRLEEVLVSVEAAAEKAGFPLNKAKQEGPCNTITAFNILLTENELEITEARLNEFIEAFKASTNPNQKDGISNYISCVNTKQSALFL

SEQ ID NO: 936 - protein, 245 aa, synthetic construct
  source 1..245: note = MG160-202 reverse transcriptase
MPVRFENYSHSFLLNGKHVFAPSELGRRIGKDIKQRVEDAFSFKDFYYHMKEGGHVEALHLHRPNKYFCKVDIENFFYSIARNRVVRALRLIRVPRATHYGKWSCVKNPYAGPSYALPYGFVQSPILATLVLENSEVGRALSRLTSDVTVAVYVDDISLSSNDLSLLRTRYDELLHAIDAAGFIVNSGKCVAPCSDLTIFNCNLRSGETSVTRDRVAEFYITPPSPARLAGFERYCASVERGNAH

SEQ ID NO: 937 - protein, 203 aa, synthetic construct
  source 1..203: note = MG160-203 reverse transcriptase
MPAKWAIKYQLKPGRWVFEPTKETKAAGEEIRKAICEKWHPPVTYYHLRSGGHVRALQSHLHHKYFIRADIDDFFGSVNRSRITRCLKGQFGYAQARRMAILSTVPHPAESARWMLPYGFVQSPILASLSLACSRLGTYLAALSKVDGVAVSVYVDDIVVSSNCISSLTECLTKLTGVAEKSGFLLNDAKVQGPAMSIIVFNI

SEQ ID NO: 938 - protein, 256 aa, synthetic construct
  source 1..256: note = MG160-204 reverse transcriptase
MPKNARWSSKFEIKPGSWVFVPTDETVKYGQKIKKAIEDRWSPPGFYYHLRDGGHVQALSSHTNNDFFIHLDISNFFGRINKSRVTRCLKGVFSYNQAREIAVESTVRDPNDPGVGTYILPFGFGQSPLIASLCLQQSRLGRFLSDLNNMGAYKVSVYMDDIVISSNSDTGLSNVLREVKPIAEKSGFPLNEAKEEGPAEKITAFNIELSNGVLTLTEERLKDFIAAYRESDNFNVISGIFGYVMTVNKGQAEKIV

SEQ ID NO: 939 - protein, 274 aa, synthetic construct
  source 1..274: note = MG160-205 reverse transcriptase
MESTCAKTSVSALADLLGIEVPYLRRLAGKAPKLYRCWDEAKKNGGKRRIEAPHPNLKIVQRKLAVSLLDQIPVDQSLHGKPGTSQMSAARLHVHQHTVMTMDLSDFFPSVTSRSLMRVLKRNGFSEEVADLVCRLCTHRKRLPQGAPTSPVLARIVVSAAAKRIRSATGTASPAVRVTQYVDDLAISGPQGIERFENLIRKIYEQDGLRINSQKTRVMRGSETKEVLGLKVNERLEISDSFAKELANARQTMARTDRRLLGKEAWKRRVERSN

SEQ ID NO: 940 - protein, 289 aa, synthetic construct
  source 1..289: note = MG160-206 reverse transcriptase
MSVPKDLASACGMSQEDIQKILSHKVYYKHSIKKKNKKLRVLYEPNEELMKLQHRLYENVLKDFDLCPGINGVPKTSIRDYINPHVEKDYVLVADVKRYFPSVKRKYVLNGLEFLNALDSSWYSPIASMVTYRGTLPQGAPTSAFMAGIAIQPIFTKLNEYAKSVDVDITVYVDDWAISGNDSKAVLKVFARLKRQMSKYDLFFSENKTHYMKVKEKQEIMGIMVGYGLKITSRYQEEVRKDICNLKNEDEFTKDDNIRSIKGKLNFIKSFDKQTFKELNKLYTKEIEA

SEQ ID NO: 941 - protein, 256 aa, synthetic construct
  source 1..256: note = MG160-207 reverse transcriptase
MPKNARWSSKFEIKPGSWVFVPTDETVKYGQKIKKAIEDRWSPPGFYYHLRDGGHVQALSSHTNNDFFIHLDISNFFGRINKSRVTRCLKGVFSYNQAREIAVESTVRDPNDPGVGKYILPFGFVQSPLIASLCLQQSRLGRFLSDLNNMGAYKVSVYMDDIVISSNSDTGLSNVLREVKPIAEKSGFPLNEAKEEGPAEKITAFNIELSNGVLTLTEERLKDFIAAYRESDNFNVISGIFGYVMTVNKGQAEKIV

SEQ ID NO: 942 - protein, 233 aa, synthetic construct
  source 1..233: note = MG160-208 reverse transcriptase
MPSEEGRALGLEVQTEVQKVWCAPDYYFHLKKGGHVAAIQHHLPSVSFVRLDLTNFFGSITATRITRSLRTLLGYARAREIALLSTVSPPGAPGSRALPYGFVQSPLLASMCLAESALGRQLHRISLDQDARVSVYVDDIIVSANDLTTASTIKTKLEDAASRAGFQFNFVKTQGPAPEVNAFNIELSQDAMRVAQDRFLEFQSRYRTDPQEQVRQALLAYVRSVNTQQADSM

SEQ ID NO: 943 - protein, 252 aa, synthetic construct
  source 1..252: note = MG160-209 reverse transcriptase
MQTKWQQKYQRSPGKWVFVPTEESRAEGKAIKEAVEDKWQPPTYYYHLRAGGHVASLRSHVNNTYFLRLDIQDFFGSVTRSRVTRSLKKIFGYERARQMANDSTVKHPADKNRAMLPYGFVQSPTLASLALFDSRLGGYLEQLKKIKYVVVSVYMDDIIVSTKRKKRLADIHKELVAASVKSRFNFQPDKTEGPAIKISAFNIELGSGDIQVTPERLQEFYDAFKKTSSLLEKNGIAGYVSSVNPAQATLLV

SEQ ID NO: 944 - protein, 268 aa, synthetic construct
  source 1..268: note = MG160-210 reverse transcriptase
MPPLPSSSTWAVTTAAMQTKWQHKYQRSPGKWVFVPTEESRAEGKAIKEAVEDKWQPPTYYYHLRAGGHVASLRSHVNNTYFLRLDIQDFFGSVTRSRVTRSLKKIFGYERARQMANDSTVKHPADKNRAMLPYGFVQSPTLASLALFDSRLGGYLEQLKKIKYVVVSVYMDDIIVSTKRKKRLADIHKELVAASVKSRFNFQPDKTEGPAIKISAFNIELGSGDIQVTPERLQEFYDAFKKTSSLLEKNGIAGYVSSVNPAQATLLV

SEQ ID NO: 945 - protein, 253 aa, synthetic construct
  source 1..253: note = MG160-211 reverse transcriptase
MALRNYEYRFELKPGKYVYVPDKQSKKIGDRIVSEVMKKWRPAEYMCHFGKKGGHLAALRPHTRNKFLASIDLRRFFESISRTKVHRSLMKIGFDSRRAFDIAEISCVSFGGRKFLPYGFVQSMALATLAIEKGLLGKVVGDCRLEGIFVTMYVDDIIMSSNSLIDLEVAYGRVISAIGEANLSVSGEKCSLPDLQVDAFNCTARNLNMELTRTRFDKFQSALIAASPRRRIAILRYVGVINAHQHSLLSIVT

SEQ ID NO: 946 - protein, 271 aa, synthetic construct
  source 1..271: note = MG160-212 reverse transcriptase
MAQILENLSVDSLAVKLGLSKTALIDLAKDVPRLYYEVSIPKKDGSERKLEIPLPILKKLQKRLLDRIIHKIPTHPKLYGRSGTSTKKAVKEHVKKETVITMDITNFFLSTKSAFVKNMLIENGSRDDVAKLLTRLVTHKKHLPQGAPTSPCVARLMLQGFAEGLEKFLKQIPYSAFSIYVDDITISGPKGIKHAKSIVKKILKRYGYDINESKTKIMNQTEEQISLNIRLNERIEATTQFLKEIEELEKEVPPYDAQLLGKKSYIKYLMK

SEQ ID NO: 947 - protein, 270 aa, synthetic construct
  source 1..270: note = MG160-213 reverse transcriptase
MDLSKITIKDIALLLKITEGNLAKLSEKAPHMYYTSGMQKRNGGIRIIEAPYTSLKKIQKILLSQLFSGLPYDPILFGGKGSSTQKAVQHHTRKSLVMTLDIKDFFPNIKSHKVKKMFTRRGAKPDVAALLTRLVTYKNHLPQGAPTSPCIARLILHPVAIHIKRAVCSVKARIEPSIWVDDIIISGPKGLKRLKKTLISILTRYDFQIPEEKFRIMSDNQEQVSLGIRLNDGIGVPSSYLQKYKDECKKLGSSSKRCQGMKAHIRNLQN

SEQ ID NO: 948 - protein, 270 aa, synthetic construct
  source 1..270: note = MG160-214 reverse transcriptase
MDLSEITIKDIALLLKITEENLAKLSEKAPHMYYTREMRKRNGGIRIIEAPHTSLNKIQKILLDQLFSGLSYDPILFGGKGSSTKKAVRRHTRKALVITLDIKDFFPNVKSHKVKKMFIRRGAKHDVADLLTRLVTYKNHLPQGAPTSPCIARLILNPVAIHIKRVVRSVKARIEPSIWVDDIIISGPKGLKRLKKTLISIFNRYDFQIPEEKFKIMPDNQEQVSLGIRLNDGIGVPSSYLQKYKAECKKLGASSKRCQGMKAHIRNLQN

SEQ ID NO: 949 - protein, 271 aa, synthetic construct
  source 1..271: note = MG160-215 reverse transcriptase
MAQILENLSVDSLAVKLGLSKTALIDLAKDVPRLYYEVSIPKKDGSERKLEIPLPILKKLQKRLLDRIIHKIPTHPKLYGRSGTSTKKAVKEHVKKETVITMDITNFFLSTKSAFVKNMLIENGSRDDVAKLLTRLVTHKKHLPQGSPTSPCIARLMLQGFAEGLEKFLKQIPYSAFSIYVDDITISGPKGIKHAKSIVKKILKRYGYDINESKTKIMNQTEEQISLNIRLNERIEATTQFLKEIEELEKEVPPYDAQLLGKKSYIKYLMK

SEQ ID NO: 950 - protein, 272 aa, synthetic construct
  source 1..272: note = MG160-216 reverse transcriptase
MRKILEDLDLSSLSQILGISLQELQDISEIAPKLYSFSQIPKKNGKSRKLEIPHQNLKKTQKIILQKILNQMELHPKLYGGPGTSTKKAAYIHTKKHLLITSDIKDFFPSVKAHHIRKMFLRYGASREISNMLTRLVTHSNHLPQGSPTSPAIGRFVLQPFAEEFENILSKIPRAAFSVYVDDIILSGPETIKGFLSTIRKILFRYGLEINDKTKLMYRHEEQICLNIRVNNGIAPPTSYINELRELSKIFPLSHPKLKGKYSYVAYLKRSD

SEQ ID NO: 951 - protein, 255 aa, synthetic construct
  source 1..255: note = MG160-217 reverse transcriptase
MPVKFETYRYSYLRKGKPVFVPSERCEAIGRELKAQVEAATDFEDIYYHLRKGGHVAALHAHRDHRYFARVDIERFFYGIGRNRVARELHAIGIGKAGYLAKWSCVKNPFGEPGHALPYGFVQSPILATLVLMRSGAGAFLRVLPAVVTASVYMDDIALSSDDLPALEAAYADLRKALQASNFRINENKAHGPDEAVELFNCELSQCFASVLQARREEFFAKEDRSAASVSAFMRYCDQIEHGNMSAAIPEAALG

SEQ ID NO: 952 - protein, 271 aa, synthetic construct
  source 1..271: note = MG160-218 reverse transcriptase
MDLSKITIKDIALLINTTEDDLIRLSEKAPHMYYSRKRRKPNGEYRNIETPHDHLKKIQKILLDQLLSKLQFDPILFGGKGSSTKKAVRRHTRKPLVMTMDIKDFFPNVKSHKVRRMFLSRGAKRNVADLLTRLVTRKNHLPQGAPTSPCIARLVLDPVTKDLKKAIQSMGAKEKPSIWVDDVIISGARGLKRSKKTLISIFNRYGFQIPEEKIKTMPKIQEQVSLGIKLNDGIAVPLRYFQKYEAECKQLGPSSARCKGMRANIKNLEKG

SEQ ID NO: 953 - protein, 255 aa, synthetic construct
  source 1..255: note = MG160-219 reverse transcriptase
MNTNPKWTHKFEIKPDSWVFVPSDFSVQEGKNIKEQIEKKWQPSAAYYHLKAGGHVAALKSHMKNKYFLRLDIENFFGSINRSRITRTLKPYFSYETAREIAVNSTVVIPNSFPKKYMLPFGFIQSPILASICLEKSSLGKFSNSLLGQSGVTVTIYMDDIIISTNDNELLMEISEKIKTVSNKSGFGINPRKQEGPSEQITAFNIKLSHKNLEISDDRMIEFLFAYKNSESYYQKKGIASYVGTVNPLQAEKFD

SEQ ID NO: 954 - protein, 279 aa, synthetic construct
  source 1..279: note = MG160-220 reverse transcriptase
MGNTEELEELLTEYPADARVFCTLEPKPDATTRPIVKPNKSLNKWLKQVKLALYKQRKDWPTFIHGGVRKRSYVSFVRPHTNKKTVITIDIRNCFGSIRQQEVQTALVKKLGLSDGLASRLATKLCYKRRVPQGFATSSYLTNLYLNDTLLRINRQMRRKQIDMTIYVDDIALSAQHIDSAEIINLVSLELSRARLAISKAKVKVMHAHKPQVICGLIVNKGAALTRQKRKEIFSDVANGRMSETSLQGWLANLNMVDETLMRKLRAYAIKKGVLRAGA

SEQ ID NO: 955 - protein, 279 aa, synthetic construct
  source 1..279: note = MG160-221 reverse transcriptase
MNTSEQIEKLLATYPSDAKAWSSREPKPSGGFRKITKPNKSLGKWLQHPNKELNTVQPNWPTFMHGGLKKHSYVTHARPHVNKPCVITIDIRKCFDSISTQQVAACLEAELIISSKLAATLSERLCFKGAVPQGFATSNFVSNLYLRKSLISIARMLKPQNLVLTNYVDDIAVSGRISDTGSVINVIAQELSKSGLAINKSRDKVKVMSSGQRQIICGLQVNRKLTITKSKKLELFSLVARGKISEVSLNGWLSNLHNVDPNFQRQLSVFAIKKGLLTQ

SEQ ID NO: 956 - protein, 406 aa, synthetic construct
  source 1..406: note = MG160-222 reverse transcriptase
MNAKNGNSCAGSVLAVKSLRRLKRSIQKQHRKGIDVVEGAIRKIEHGYSKEALLSLERLRFIGLTAEELMLVDDTIDMLKVRSDSKLKTVTLGYVTSLTYKLAVDQSISFAIAEAVKYTLPFLISFQYQSVNKIPTQSFIEHELGLTQAEFVALCNRAPKSYFKDVQTKPSGGHRVIYKPHGCIKKHQRKLNQVLSKFPVASGICGGPGTTIMSAMKPHCHNPLLLTLDLKNFFPSIGQKRVEKLFHDVLDDQAMAPAFTRLCTTDRILPQGAPTSSTIARIIVEPAFVALQAALRKMHPNCEATIWVDDIVVSGPLGIRRAKNVLAKVFERFGFTVNQDKTKVMFGDAERSSLGLTLRDVIYPSAEVIKKFEACKRETPENFRSIAGYINFFKDVAKANDQYALT

SEQ ID NO: 957 - protein, 257 aa, synthetic construct
  source 1..257: note = MG160-223 reverse transcriptase
MSTSKRWIHKFQIKNNVWVFVPDNESRRYGNEIKSNIDKKWKKPSYYYHFRDGGHVAALKSHINNTFFIHADIQDFFGAINKSRVTRNLKSFFGYKIAREIAEKSTVQCPHSNVKKYVLPFGFVQSPILASFCLHKSRLGVYLDKLYDSGDFKVSVYMDDIIISGKKLEDLNEILVKLNSISDHSGFQLNIKKTQISSTIKSFNIELSHNKLRISKERMCEFISHYMSGGKYRRIGILCYISTVNKKQLRVFKLIDK

SEQ ID NO: 958 - protein, 271 aa, synthetic construct
  source 1..271: note = MG160-224 reverse transcriptase
MTDNLENLNLSSLSKIVGIPVQELLNISEIAPKLYYHSLIPKKNGKHRKLEIPHSNLKRIQTIILHEILDKLDIHPDLFGGPGTSTKKAAQAHVRKHLLITTDIKDFFPGVKSYHIRNMFLRQRASLEISGILTRLVTHNNHLPQGSPTSPAIGRLVLQPFAEELENILNKIPRAAFSIYVDDIILSGPKGIKGFLSTIRKMLLRYGLKINNKTKLMYRNQEQVCLNIRVNDGIAPPISYLNELKELSKIYPSSHPKIKGKASYMKYLKKP

SEQ ID NO: 959 - protein, 252 aa, synthetic construct
  source 1..252: note = MG160-225 reverse transcriptase
MLELSEDAPFLYRKVRIPKNDKEFRQLEIPHQILKNFQRRLLHRVFDKFPIHPKIFGGPKSSTKKAVASHIKKPVVITMDIKNFFPSVKKHYINDAFHAFGINKDLSTILTRLVTFHNHLPQGAPTSPCIGRMVLNPFAFELNKMMKRIHPNATFSIYVDDITLSGPEGIKRIIPTICKVLGRHGFNIKKEKTQIMYRNNEQVSLNIRLNERIEATKKYLAEIEELEKHLAPWDPRLLSRKAYVKYLSKPIY

SEQ ID NO: 960 - protein, 253 aa, synthetic construct
  source 1..253: note = MG160-226 reverse transcriptase
MVPKWSSKFELKPSKWVFVPTEESKENGAKIKAAIQECWSPPSYYYHLRSGGHVEAVKSHLGHTTFLHVDIQDFFGSINRSRVTRNLKAKFSYEVAREIANASTVRHPDDKDRYIIPYGFVQSQIVAALCLDQSRLGTYLGKLCKQKDVALSVYVDDIIVSCADANQANSILVGLIAAAESAGFTLNPDKQEGPAAEITAFNILVANASMAIEGNRLAKFVEALAVTSSEPQRAGILSYVKSVNAVQSDSLVV

SEQ ID NO: 961 - protein, 252 aa, synthetic construct
  source 1..252: note = MG160-227 reverse transcriptase
MQSKWKSRFQLKPGKWVFVPTDESIRLGHEIKSAIENVWLPPDNYFHLRSGGHVGAIRSHMPSKFFLRIDIQNFFASINRTRITRCLNKFFSYQKARDWANASTVIAPTGEKRTILPFGFVQSQLISAVCFSESALGRCLAGIHCDKSLRVSVYVDDIIVSSDKKEACGSALEKIRVAADRSRFKLNEEKLEGPSESITVFNVILSNQRIEIQASRMKDFKKTFASTTNEYEKAGILSYVSSINLDQAAELQ

SEQ ID NO: 962 - protein, 257 aa, synthetic construct
  source 1..257: note = MG160-228 reverse transcriptase
MPPTEKWKSKFQIKSNSWVFVPNDESVRYGKEVKLTLEKRWSAPDFYYHLKDGGHVKALKSHTGHQFFIHLDIKDFFGSINRSRITRCLKRYFGYTSAREIAEKSTVMLPNNAVKKYILPFGFVQSPIIASICLDKSGLNQCLYRLSKTPDIAVSVYVDDIIISGNNLLFLSQKLSDIKNAAIKSGFALNPEKEEGPSEKITAFNIELSHREVELIASRFNKFCDEYKSSANPNQRKGIIGYISSVKSTQADDLQKL

SEQ ID NO: 963 - protein, 274 aa, synthetic construct
  source 1..274: note = MG160-229 reverse transcriptase
MDKPIDLTSERLSSILGIPTDAILELAKDAPFLYLKVKIPKNEKEFRKLEIPHPILKSFQRQLLHKVFDKFNTHPCLYGGRESSTKKAVHAHIKKPIVITMDIRNFFPSVKKYSIINALNTFGISEDLSMIVARLVSCHNHLPQGAPTSPCIGRLVLNQFAVELDSMLKGIHSNSAFSIYVDDITISGPEGIKRIIPTVEKMLFRHGYKIRKGKTQVMHRSDEQISLNIRLNNRIEATSIFLAEIEELEKRLPPWNPKILGKKAYVKYLLKPLS

SEQ ID NO: 964 - protein, 248 aa, synthetic construct
  source 1..248: note = MG160-230 reverse transcriptase
MPVHIRNFEYSYIRNNKPIFVPTGIGRRIGQEIKYKVEKAHKFDDFQFHLRRGGHVAAIHSHRDGLFFAKIDIANFFYSVSRRRVQSALARIGLDSPRFFAKWSAVKNPYGLPEFAIPYGFVQSPILASLVFYFSETANFIRSAIGDINISVYVDDISISSKCEISVAQAYAEINRLLPEDGFQINDQKLAPPAADIVLFNCELKNQLAEVQEARIAKFFSVERSPAAEEAFAAYCASVERGNLKSGD

SEQ ID NO: 965 - protein, 274 aa, synthetic construct
  source 1..274: note = MG160-231 reverse transcriptase
MEKIVDLTCEKLTSFLSIPIEIILELAEDAPFLYHKARIPKNDKGLRKLEIPHQILKCFQRQLLHKVFDKFQTHPCLYGGPKSSAKKAVYAHVRKPIVITMDIRNFFPSIKKHKVIDALNFFGVNKDLSIILARLVTSHNHLPQGAPTSPCIGRLVLNPFAYELDKMLKGIHPSSAFSIYFDDITISGPEGIKRIIPIVDKMLIRHGYELKKEKTQIMKKCDEQVSLNIRLNKKIEATNKFQAQIEELEKQLPPWNPKLLGKKAYVRYLSRPLC

SEQ ID NO: 966 - protein, 251 aa, synthetic construct
  source 1..251: note = MG160-232 reverse transcriptase
MQSKWKSRFQLKPGKWVFVPTDESIRLGHEIKSAIENVWLPPENYFHLRSGGHVGAIRSHMPSKFFLRIDIQNFFASINRTRITRCLNKFFSYQKARDWANASTVIAPTGEKRTILPFGFVQSQLISAVCFSESALGRCLAGIHCDKSLRVSVYVDDIIVSSDKKEACGSALEKIRVAADRSRFKLNEEKLEGPSESITVFNVILSNQRIEIQASRMKDFKKTFASTTNEYEKAGILSYVSSINLDQAAEL

SEQ ID NO: 967 - protein, 271 aa, synthetic construct
  source 1..271: note = MG160-233 reverse transcriptase
MTDNLENLILSSLSKIVGIPVQELLNISEIAPKLYYHSLIPKKNGKHRKLEIPHSNLKRIQTIILHEILDKLDIHPDLFGGPGTSTKKAAQAHVRKHLLITTDIKDFFPGVKSYHIRNMFLRQRASLEISGILTRLVTHNNHLPQGSPTSPAIGRLVLQPFAEELENILNKIPRAAFSIYVDDIILSGPKGIKGFLSTIRKMLLRYGLKINNKTKLMYRNQEQVCLNIRVNDGIAPPISYLNELKELSKIYPSSHPKIKGKASYMKYLKKP

SEQ ID NO: 968 - protein, 257 aa, synthetic construct
  source 1..257: note = MG160-234 reverse transcriptase
MPPTEKWKSKFQIKSNSWVFVPNDESVRYGKEVKLTLEKRWSAPDFYYHLKDGGHVKALKSHTGHQFFIHLDIKDFFGSINRSRITRCLKRYFGYTSAREIAEKSTVMLPNNAVKKYILPFGFVQSPIIASICLDKSGLNQCLYRLSKTPDIAVSVYVDDIIISGNNLLFLSQKLSDIKNAAIKSGFALNPEKEEGPSDKITAFNIELSHRELKLIDSRFNEFFDEYKSSANPNQRKGIIGYISSVNSTQADDLQKL

SEQ ID NO: 969 - protein, 257 aa, synthetic construct
  source 1..257: note = MG160-235 reverse transcriptase
MSTSKRWIHKFQIKNNVWVFVPDNESRRYGNEIKSNIDKKWKKPSYYYHFRDGGHVAALKSHINNTFFIHADIQDFFGAINKSRVTRNLKSFFGYKIAREIAEKSTVQCPHSNVKKYVLPFGFVQSPILASFCLHKSRLGVYLDKLYDSGDFKVSVYMDDIIISGKKLEDLNEILVKLNSISDHSGFQLNIKKTQISSTIKSFNIELSHNKLRISKERMCEFISHYMSGGKYRRIGILCYISTVNKKQLRYFKLIDK

SEQ ID NO: 970 - protein, 244 aa, synthetic construct
  source 1..244: note = MG160-236 reverse transcriptase
MIENYKFKYRSRGKIIFVPNERCERKGRRIIKFFSKRVDFPGYFFHYKSGGHVAALHAHLGNTLFFKIDIQNFYYSIARMRVTRALRSWGYPGAGTLAKWSCVANPMAGPRHVLPIGFFQSPLLASLVLMKSPVAQAIERAIANGVCISVYLDDFLGSHNDAHVLEAAYADIRDTCTSSGLVPNPNKLVPPSAAITAFNCDLTHGSARVRNDRIARYYAAPTRTPESDAAFEQYRLLIASANTA

SEQ ID NO: 971 - protein, 248 aa, synthetic construct
  source 1..248: note = MG160-237 reverse transcriptase
MIENYKFKYRSRGKFIFVPNERCERKGRRIIKFFSKRVDFPDYFFHYKLGGHVAALHAHLNNKLFFKIDIQNFFYSIARMRVTRALRNWGYPGAGTLAKWSCVANPGPGPKYVLPIGFVQSPLLASLVLMRSPVAEAIDRARTNGVVISVYLDDFIGSHDNEGALGVAYEDIRASCVKAHLIPNPNKLVPPNTAITAFNCDLTQGSAKLTDDRIARFFSVARSAASQSAFEDYKVRVASANLRTLNSE

SEQ ID NO: 972 - protein, 237 aa, synthetic construct
  source 1..237: note = MG160-238 reverse transcriptase
MAKFGKEIKLAIEGWWAPPPYFYHLRAGGHVAALKAHLGHSMFLRLDVQDFFGSVSRTRVTRCLKKKFGYEKAREWANASTVTHPSHAKRTMLPFGFVQSPILASLCLAKSSLGSCLSKVYRNKDLAVSVYVDDIILSSRRPDVLDEGFLGGLRTAAERARFAFSAEKAQGPSPTIKAFNIELCKESVRIDEERMKAFVEALNKSESQPQRAGIVSYISSVNADQGKDAAELAAASP

SEQ ID NO: 973 - protein, 281 aa, synthetic construct
  source 1..281: note = MG160-239 reverse transcriptase
MNLSDLSIHTLSNMLNLSDKDLAHLSQQAPLLYNSYKIRKKSGKLRLIEAPHGNLKIIQKLLLDRLLSKLHADPILFGFKGSSTISALRDHTHMPLVLTMDIKDIFPSVKSYMVRKMILRHGAKNDLAVLLTRLVTRKNHLPQGAPTSPCVARLVLHHLVEHLKGAIRSTTDRARISIWVDDVTFSGPIGLKRLKKTLISIFNRNGFIIPENKVKIMPNNIEQESLGIRLNEGIGVTSSYIQKYKDECKRLGASSRRCRGMLARIKYLQAVNQLSPNGNLK

SEQ ID NO: 974 - protein, 266 aa, synthetic construct
  source 1..266: note = MG160-240 reverse transcriptase
MPAKWQHRFERKPGRWVFVPTPEARAAGLEVKNLIESRWKAPNYFFHLRKGGHIAALRRHRQSTCFVKADIADFFGSVSRSRISRLLKEFFSHDEALRIATSSTVRHPLNDKRKILPYGFIQSPLLASLALHKSGIGKYLDALHRDKRFVVTVYMDDIIVSGSDQDELLDVLTEMKDKAQRSGLVFGREKEQGPSESISAFNIELARQTPISLLPPKLEEFSEAFRTSTSDLQRAGIQGYVYSVNPTQADSLPSRSKEAGGGPKTP

SEQ ID NO: 975 - protein, 245 aa, synthetic construct
  source 1..245: note = MG160-241 reverse transcriptase
MPVAIPNFDYSYLRKGKPVFVPTKMGRRIGHEIKGKVESAYAFDPIYFHLRRGGHVAAMHYHRDNQHFARIDISNFFYNISRRRVQSAMERVGMGNVRFYAQWSTVSNPYGNPKYVLPYGFVQSPILASLTIATSDVGSHLVGLPPNIKVAVYVDDISLSSNDPDALQRVFDATLAIVESDGFSINPNKLRPPSPVIDLFNCDLQHGKTTVTDERIQAFLSNHPSQNAQDAFATYCASVERGNQP

SEQ ID NO: 976 - protein, 221 aa, synthetic construct
  source 1..221: note = MG160-242 reverse transcriptase
MVKAILKRWSPNASMYHLKKKGGHVAAMRPHIGKSYHASVDLTNFFGSVSRTKVHRALMKIGFRNRQALDIASESCVELGGRKFLPYGFPQSMILASLVLEKSVLGATISDLRASGTIVTVYVDDILLSAETLEELREAYDRVLESVVLSGFEPSVKKSEPPSTEIHSFNCRISDRLEILEERMERFKEQVKLATPRGRAALLRYVGVINGDQARSLASNP

SEQ ID NO: 977 - protein, 274 aa, synthetic construct
  source 1..274: note = MG160-243 reverse transcriptase
MSIKLGDLDLNSLSIILGISSQKILKLSKIAPILYHEVTISQKNGKTRKIEIPDHKLKKAQKIILHEIFYKLPIHPLIFGGPGSSTKKAALLHTRKHVLIAADIQDFFPSIKSFQIKRMLQYHGATEDISDLLTRLSTHKNHLPQGAPTSPAIGRLVLEPFARELENILKKIPQSSLSIYVDDIILSGPKGVKRFLPTIKKMLTRYGLKINNKTKIMFKDEEQICLNIRVNDGIAPPTAYVQEMQELSKLVPPSDPRLKGKKSYIDYLKRPIIN

SEQ ID NO: 978 - protein, 255 aa, synthetic construct
  source 1..255: note = MG160-244 reverse transcriptase
MSSTEKWISKFQYKHSWVFVPTKETAQYGKIVKLSIEKYWSAPDFYYHLRDGGHVKALKSHIGNQFFIHLDIKNFFNSINRSRVTRSLKDFFEYSNARQIAVASTVRLPESSIKKYILPFGFVQSPIIASICFHKSRLSKYLYNLNKLGDVIVSVYVDDIIISGNDFSSLQKILDEVKLAAEKSGFPLNPEKEEGPSEKITAFNIEISHGLLKITDSRFNDFYEAYKASDNINQREGIAGYVSSVNQDQANDLYN

SEQ ID NO: 979 - protein, 258 aa, synthetic construct
  source 1..258: note = MG160-245 reverse transcriptase
MHSYPRWHHKYKLKHDVWVFEPTEETIQIGNEIKNAVQDKWIVPDNYYHLNLGGHVAALNLHKTDTVFVHLDIKKFFNTINKSRITRSLKYLFDYPTSRNYALLSTVKHPDKSPTIFILPYGFVQSPILASLCLRQSALGIKIENLSKSSLIRISVYMDDIIISGSDESYISVLVSELKLAAEKSGFILHKEEGPAQEITAFNIRLSNNKTVIIDSRYKELWDDYNGTTNNNVKHGIATYVSTVNNIQSVGLDGPLTY

SEQ ID NO: 980 - protein, 217 aa, synthetic construct
  source 1..217: note = MG160-246 reverse transcriptase
MQARWSEKFELKPGRWVFVPTDESRQKGTVIKNEILKFWAPPDYMYQFRSGGHVAALQAHLEGNWFIRVDLRDCFGSINRTRVTRCLKRLFGYALAREWANASVVRLPNESRWFLPFGFVQSPVIAALCLAQSALGSFLQSLNKEKAIVATTYVDDIIISTESEDRAFTVFNELMTAVNRARFEVNHSKTSGPSTSITVFNLDLKEPLQNLAVRRQV

SEQ ID NO: 981 - protein, 280 aa, synthetic construct
  source 1..280: note = MG160-247 reverse transcriptase
MAIEFENFLYSYSKKRKRIFVPNRFSCNLGKKLKRKIAKKYRFDSFVYHFRKGSHIAALHRHRKNKFFCRLDINRFFYSIRRNRIKRALKQIGIEKPEYFAKWSTVRNPYEGGGYVLPYGFVQSPVLATLVLALSPIGAYLRGLPKTITCSVYMDDLCLSGPNLAELKAAFDGLVAAVEQAGFTLNDKKTREPAEQIDIFNCSLANDSTAVLQDRVDEFYANERSEAAVDAFETYCDIVQSKTWRHGPSKKKRNKVYTERRKKAAPTTPLPEEEPREIAS

SEQ ID NO: 982 - protein, 277 aa, synthetic construct
  source 1..277: note = MG160-248 reverse transcriptase
MTAADRISYLLDRYPVDTSVQRWHRAKLGGGQRSIVTPNDALKRWLRLMNAALIRQFNDWPSFMHGGIKKRGYVTHARQHVARPCVITIDIKSCFDSITEREVADAMQRHLGLDDDVCARLANVLCFRGAVAQGFPTSNYICNLYLLDPLSSMHSRLSVRHIRLSNYVDDIAVSGAIVAPGELVNEIALNLSRAKLSMNKAKVSVMPSSKRQVVCGLVVNKRLSLTSTLKLKLLGDVAHGRMSPASIAGWIANLKSIDPVFGTKLHQLAMRKGLLKS

SEQ ID NO: 983 - protein, 234 aa, synthetic construct
  source 1..234: note = MG160-249 reverse transcriptase
MYHFRKGSHIAALHRHRKNKFFCRLDINRFFYSIRRNRIKRALKQIGIEKPEYFAKWSTVRNPYEGGGYVLPYGFVQSPVLATLVLALSPIGAYLRGLPKTITCSVYMDDLCLSGPNLAELKAAFDGLVAAVEQAGFTLNDKKTREPAEQIDIFNCSLANDSTAVLQDRVDEFYANERSEAAVDAFETYCDIVQSKTWRHGPSKKKRNKVYTERRKKAAPTTPLPEEEPREIAS

SEQ ID NO: 984 - protein, 281 aa, synthetic construct
  source 1..281: note = MG160-250 reverse transcriptase
MKTKAETFEKLLNSYPNDASIFRTSIEKRDGGTRPIVKPNKVLRLWLRQVLRALRGARKDWPVFIHGGVRKRSYVSFVKPHTSKKLVVTIDIRNCFGSITGKQIVEALVVKLKMPHDLAKKLAAQLCVDGKIPQGFATSNFLTNLYLNDALLAINRRLARKGVSMTTYVDDIAISGNDFDPAEVINIVCEELSRARLAIKKAKVKVMRSNTRQVVVGLVVNKGVAISKEKRKEIFSLVSSRTMSEESLAGWISNLNMFDKPLMRKLKSFAVRKGYAIPEKK

SEQ ID NO: 985 - protein, 251 aa, synthetic construct
  source 1..251: note = MG160-251 reverse transcriptase
MPVQFQNYEYSYLRDGKPVFVPSPVGKKIGYDIKGKVEESFEFDHFVYHFLPGGHVSALHAHRGNHIFARVDIETFFYGIGRNRVTKALRSIGIDRAERYAKWSTVKNPYGAPSYSLPYGFVQSPILASLVLLKSSVGDYLRGLPGHITKSIYMDDIVLSGQTLDTVTIAFDGLLAVLEQSNFQINEEKTRVPAPAMDVFNCDLAFGETAVREDRKLEFYETVSSAASAAAFERYCMTVEQGNLLPRIDQQ

SEQ ID NO: 986 - protein, 279 aa, synthetic construct
  source 1..279: note = MG160-252 reverse transcriptase
MAPQEYTLCQLANNLGFTTVQTLQAFAKKAPSCYGRVVIPKDKQNPTKGLREINPPTEELKQIQRLLLEKVLYHINTLDNMGAGRGSSTAKIMALHTKKDMMLCYDISNFFPSVKKWTIKRCLRDRGFPWDVIDVIANLTTFNNHLPQGGPCSTQLGKIIISPPAKHLLRLLKNYGTAVDVSFWVDDIIISGPRSLKNLEKSDNVYNIFSRYGFQLKREKTKIQPKTDEQNALGLRVDRGIVEPDSEFICSYSTEISLNGCNSKRAKGMRNYMKSVRKK

SEQ ID NO: 987 - protein, 285 aa, synthetic construct
  source 1..285: note = MG160-253 reverse transcriptase
METIMAPQEYTLCQLANNLGFTTIQTLQAFAKKAPSCYGHVVIPKDKQNPTKGLREINPPTEELKQIQRLLLEKALYHINTLDNMGAGRGSSTAKIMVLHTKKDMMLCYDISNFFPSVKKWTIKRCLRDRGFPWDVIDVIANLTTFNNHLPQGGPCSTQLGKIIISPPAKHLLRLLKNYGTAVDVSFWVDDIIISGPRSLKNLEKSDNVYNIFSRYGFQLKREKTKIQPKTDEQNALGLRVDRGIVEPDSEFICSYSTEISLNGHNSKRAKGMCNYMKSVRKIMR

SEQ ID NO: 988 - protein, 268 aa, synthetic construct
  source 1..268: note = MG160-254 reverse transcriptase
METIMAPQEYTLCQLANNLGFTTVQTLQAFAKKAPSCYGRVVIPKDKQNPTKGLREINPPTEELKQIQRLLLEKVLYHINTLDNMGAGRGSSTAKIMALHTKKDMMLCYDISNFFPSVKKWTIKRCLRDRGFPWDVIDVVANLTTFNNHLPQGGPCSTQLGKIIISPPAKHLLRLLKNYGTAVDVSFWVDDIIISGPRSLKNLEKSDNVYNIFSRYGFQLKREKTKIQPKTDEQNALGLRVDRGIVEPDSEFICSYSTEISLNGRNSR

SEQ ID NO: 989 - protein, 252 aa, synthetic construct
  source 1..252: note = MG160-255 reverse transcriptase
MARSFEKFYEIKEGRFVFEPTTKARKIGEEILNDLFKIWSPPDHFYHLGKSKGHVEALRVYSKSRLFASIDIENFFGSVTRTKISRSLRAIGIDDKKGFSIAYDSVVDFGGTKTLPYDFIQSVALATLVMEFSALGNAIRQAIKSNVMITVYVDDIILSGEHAETLQHHFDEFVRTTNAAKFNISAKKCQNVSDKIEVFNCNLSKSHISTNPKRMAQFKVDYAHASDARRASIEKYITAVNKSQVAELGRLH

SEQ ID NO: 990 - protein, 251 aa, synthetic construct
  source 1..251: note = MG160-256 reverse transcriptase
MKNYFRKIPLGDGKFAYEQTPEARKEGENLVKQVFKRWDAPSFFFHMKAGGHVAALASHKKNCYFTKLDISRFYYNVTRAKLVRSLQKIGVPFEAAMYYAQISLVCDRGHRFLPYGFHQSPALSALVLDKSLAGRYLREAARKFTLSVYVDDIILSSRNSEALAKSSDQLVQALHGSNFSINESKSKICSASCISFNVLIQENSTEITDQRLDQFKTQISEVNGKESVVQGILQYVHSISPEQAKGLAREV

SEQ ID NO: 991 - protein, 255 aa, synthetic construct
  source 1..255: note = MG160-257 reverse transcriptase
MEQNYEYYFELAPGKFVFLPTAKCKAEGKKIIKRLRKVWTPDRYFYHFGKKGGHVAALRPHVKSNYFARIDLANFFPSISRTRLHRSLKSQGFSNRAALDIAAASCVEKDGRKFIPYGFVQSMAMATLSVEKSLLGRKIKEFRDTGATITMYVDDIIISSNKYMQAEHIYNELMASALECGLQISDQKTSRPKESVGAFNCDVSHSLIAINEERMQKFREQLSQANEKQRMAILRYASVINPAQAHELAQVRSHI

SEQ ID NO: 992 - protein, 244 aa, synthetic construct
  source 1..244: note = MG160-258 reverse transcriptase
MAVKYQNFTHSFNLNGKPVFAPTEVGYRIGRDIKKLVETSYNFEDFYYHLRCGGHVAALHGHRENAYFCKVDIENFFYSIPRNRVIRCLKSIGISRHSHYAKWSCVKNPFTPPSYALPYGFVQSPILASLVLSRSELGEFLRDATKEFNVAVYVDDISLSGNDLSALNDAYLRLNDAADRAMLKLNPTKSVKPSEFLEVFNCSLETGKAEVTHSRIADFYKYGHPPSSVRAFEGYCSSVSKGNR

SEQ ID NO: 993 - protein, 273 aa, synthetic construct
  source 1..273: note = MG160-259 reverse transcriptase
METILNKLTVETLAKRLELPSYILLELAENAPNLYSEHSIPKNNSGTRILEIPYPILKNFQKKLLDKILHKIPTHPKLFGRPGTSIKDAVANHVKKSMVVQMDIKNFFPNTKSHKIKKAFIMNGGSQEIANILTRLVTYKNHLPQGAPTSSCIGRIILKPFAEQLERLLIRIPKSSFSVYVDDIIISGPDGLKRIKNTIFKILKRHGFEINKSKIYIMNRKGEQISLNIKLNNGIEATKKFLREIEELSTQLPPSNPTLKGKKAFVEFLLREK

SEQ ID NO: 994 - protein, 259 aa, synthetic construct
  source 1..259: note = MG160-260 reverse transcriptase
MKNYVSKIPLGDGKFAFHQDPTFQRLGLDLTEKILQNWKAPNIFYHMRNGGHIAALHKHLEGQYFSHFDIRRFFYQITKNKIIRSLKRIGFSYDKAIDAASHSVVHVDNTYFLPYGFTQSPILASLCLFHSGAGRYLMRLPKTVLVSVYVDDIILSATSKDELSQVSEEAAQWFEASQFPFAPDKTEVCQSAITSFNVELSHGHTQITDDRMRAFKRQVTENIYNKGSLQGIQNYISSINTEQSDEISAYIEGLFKGQA

SEQ ID NO: 995 - protein, 245 aa, synthetic construct
  source 1..245: note = MG160-261 reverse transcriptase
MSVKFPTYNYSFEVSGKRIYFQSKWARKKGEEIKNLVENAYNFEDYFYHLKKGGHISAIHSHRQFRFFCKLDIENFFYSINRNRVQKKLKKLKIPNSQFYSKVSCIKDPNYSNYVLPIGFKQSPVLSSLVLAKSTIGDTLYEMKDQNVCNISVYVDDICLSSNNLKTLQECYNELKNKIEESNFSINKNKSREPCEEIEIFNCSLKYEKTLVLPNRITYFNNRNTNPASKIGFDNYCSSVEIGNR

SEQ ID NO: 996 - protein, 245 aa, synthetic construct
  source 1..245: note = MG160-262 reverse transcriptase
MSVKFPTYNYSFEVSGKRIYFQSKWARKKGEEIKNLVENAYNFEDYFYHLKKGGHISAIHSHRQFRFFCKLDIENFFYSINRNRVQKKLKKLKIPNSQFYSKVSCIKDPNYSNYVLPIGFKQSPVLSSLVLAKSTIGDTLYEMKDQNVCNISVYVDDICLSSNNLKTLQECYNELKNKIEESNFSINKNKSREPCEEIEIFNCSLKYEKTLVLPNRITYFNNRNTNPARKIGFDNYCSSVEIGNR

SEQ ID NO: 997 - protein, 256 aa, synthetic construct
  source 1..256: note = MG160-263 reverse transcriptase
MPKNARWSSKFEIKSGSWVFVPTDETVEYGQNVKKAIEDRWLPPSFYYHLRDGGHVQALSSHTNNDFFIHLDISNFFGCINKSRVTRCLKGLYSYNQAREIAVESTVRDPNNPGIEKYILPFGFVQSPIIASLCLQQSRLGRYLSDLNNMDAYKVSVYMDDIVVSSNSDAGLSNVLREVKPIAEKAGFPLNEAKEEGPAGKITAFNIELSKGVLTLTEERLQDFIAAYRESDNFNVISGIVGYVTTVNKGQAAKIV

SEQ ID NO: 998 - protein, 239 aa, synthetic construct
  source 1..239: note = MG160-264 reverse transcriptase
MENYDSRIPFGNGKFAYVQKEEFRTQALEHMNRIRGLWSPPSFYFHLQPGGHLAALRSHIGNRYFGRVDLERFFENVTKNRLIRTLKRIGYSFADSREFASASTVRVRGAGPRRFALPYGFVQSPLLASVALDRSALGSCLSRLDRSRSRVSVYVDDIVVSSIKREGVISAMDLIRRAADQSGFPVNKEKVIEFTQEITVFNIIFDGIKMEIKEERFEEMSQDIAQEGPGASSMGFGAM

SEQ ID NO: 999 - protein, 280 aa, synthetic construct
  source 1..280: note = MG160-265 reverse transcriptase
MAIEFENFLYSYSKKGKRIFVPNRFSCNLGKKLKRKIAKKYRFDSFVYHFRKGSHIAALHRHRKNKFFCRLDINRFFYSIRRNRIKRALKQIGIEKPEYFAKWSTVRNPYEGGGYVLPYGFVQSPVLATLVLALSPIGAYLRGLPKTITCSVYMDDLCLSGPNLAELKAAFDGLVAAVEQAGFTLNDKKTREPAEQIDIFNCSLANDSTAVLQDRVDEFYANERSEAAVDAFETYCDIVQSKTWRHGPSKKKRNKVYTERRKKAAPTTPLPEEEPREIAS

SEQ ID NO: 1000 - protein, 277 aa, synthetic construct
  source 1..277: note = MG160-266 reverse transcriptase
MTAADRISYLLDRYPVDTSVQRWHRAKLGGGQRSIVTPNDALKRWLRLMNAALIRQFNDWPSFMHGGIKKRGYVTHARQHVARPCVITIDIKSCFDSITEREVADAMQRHLGLDDDVCARLANVLCFRGAVAQGFPTSNYICNLYLLDPLSSMHSRLSVRHIRLSNYVDDIAVSGAIVAPGELVNEIALNLSRAKLSMNKAKVSVMPSSKRQVVCGLVVNKRLSLTSTLKLKLLGDVAHGRMSPASVAGWIANLKSIDPVFGTKLHQLAMRKGLLKS

SEQ ID NO: 1001 - protein, 252 aa, synthetic construct
  source 1..252: note = MG160-267 reverse transcriptase
MARSFEKFYEIKEGRFVFEPTTKARKIGEEILYDLFKIWSPPDHFYQLGKSKGHVEALRVYSKGRLFASIDIENFFGSVTRTKISRSLRAIGIDDKKAFSIAYDSVVDFGGTKTLPYGFIQSVALATLVMECSALGSAIRQAIKSNVMITVYVDDITLSGEHAETLQHHFDEFVRTTNAAKFNISAKKCQNMSDKIEVFNCNLSKSHISTTPKRMAQFKVDYAHASDARRASIEKYITAVNKSQVAELGRLH

SEQ ID NO: 1002 - protein, 260 aa, synthetic construct
  source 1..260: note = MG160-268 reverse transcriptase
MSEQRWLHKFELKQNCWVFVPNDESRINGLIIKKRIEEKWKPPDYYAHLRKGGHIYAVKKHLGNDLFFCADISQFFNRINLSRVTRELKSIFKDYTESRYIACESVVQLPNSKERKYILPFGFIQSAIIASLCLNNSALGKYLNQLASNGFRVSVYMDDIIVSTSLPLAQAETAFDVLHKKAVRSGFNLNTNKTFGPSDTITAFNIHLSKGKIELTDSRLDEFKKAIIEADNSTVIDGILRYVDSVCPKQVPILQAACLL

SEQ ID NO: 1003 - protein, 276 aa, synthetic construct
  source 1..276: note = MG160-269 reverse transcriptase
MTIPEELEKLLASYPIDADFSRVHQPKKSGGTRLIVAPNEPLRKWLKQVSSTLRRAKKDWPEFIHGGVRKRSYVSFVRPHINKKTVITLDIRKCFPSIKQSFIVHALQSKLELDPDLAKRLASKLCLDGNLPQGFATSNFLTNLYLNDTLLEIRRKLAKEMDFTIYVDDIAISGNSLNAGEIINLICIELSRAKLAVDKKLKIKVMHSNRRQVVVGLVLNKGISLSREKRLWIFSQVATKQMSQETLDGWRANINMFDKPLLKKLETYASKKGYRI

SEQ ID NO: 1004 - protein, 245 aa, synthetic construct
  source 1..245: note = MG160-270 reverse transcriptase
MSVAIPNFTYNYLRKGKPVFVPTKIGRRIGTEIKEAVEGAYAFGPIYFHLRRGGHVAAMHHHREKNTFARIDISNFFYSISRRRVQSALDRIGVGNACFYAKWSTVLSPFGNPRYALPYGFVQSPILASLVIATSDLGQHLLKLPASVKAGVYVDDISLSSDDADELQRAYNATLAVIAADGFAVNPGKLRPPAPAIDIFNCDLSHGKASVTDDRINAFLATNPSQAAEDAFVAYCASVEMGNQP

SEQ ID NO: 1005 - protein, 249 aa, synthetic construct
  source 1..249: note = MG160-271 reverse transcriptase
MDLGLKNYEYSYRNAKGKPVFAPSAEGREIGRKVKELVSEAVEFDSIYYHLKPGAHVSALHAHRDNTWFSRIDLKNYFYSISRNRINRELRGIGVRHHERFSKWSTVRNPYETPSYSLPYGFVQSPILATLAFQNSAVGTLLRDMPAEVTVSVYLDDIGLSSSNPDLLRKAHHATLRAVEESNFVVNMDKTAAPSDQMVLFNCDLTHASANVRAERIDEFFSTERSEPSASAFLAYCEAVSAGNLTLDG

SEQ ID NO: 1006 - protein, 252 aa, synthetic construct
  source 1..252: note = MG160-272 reverse transcriptase
MPKKWETRFELKPGTWVFVPTEEARELGYVIKELVGARWRPPKNYFHLTNGGHVHAIAAHVHNTSFAHLDIQDFFGQINASKVTRWLKPLVGFSKAREFAKASTVAHPRDGGTMLPFGFVQSPILASLCLFHSALGRCLFELPRKLGVVVSVYVDDIILSAEDESILAQAVKLVDESAVRSGLPIHPDKREGPAQNITAFNIDLAHQFLRIEEERWNSFLNDYQAATSEYVREGILSYVRSVNSDQANILGT

SEQ ID NO: 1007 - protein, 251 aa, synthetic construct
  source 1..251: note = MG160-273 reverse transcriptase
MSHNYKYRFELRPGKHVYVPTPEAIAYGEAIVADVRKHWQPANYFYHFGKMGGHVAAMRPHVSRRYKASIDLKNFFGNVTRSKVSRSLVSIGKPSKEAFSIATESCVVDGQSKFLPYGFVQSMALATLAVENSSLGRCIANCRASGLIVTMYVDDILMSSDDLKIISSAYEDIIASIESSNFSVSASKCSPPSSSVEAFNCIIQKGKIEVSDPRMNAFRDQLIFASEDAREAILRYVSVLNVTQASQLAVS

SEQ ID NO: 1008 - protein, 253 aa, synthetic construct
  source 1..253: note = MG160-274 reverse transcriptase
MLPRNYSYKYERKPDRFVYVQSEKQSLDGSIIALRVARRYKPSPIFFHFRRRGGHLSALKLHLDSSYFARFDIDYFFGRVTRTKVARCLREIGFTRKAAFSMAYDSVVTEGVRKIVPYGFPQSTILSTLVLEKSLLGQVLIAANSSGTKVSVYVDDIIISSDDKNELERTYDGIIAASIASNFPFGVAKTTSASIKVEAFNCHISRGLCGFVDERMNRFVETHADRTELGKEIVERYICEVSPSELLRFKTLL

SEQ ID NO: 1009 - protein, 195 aa, synthetic construct
  source 1..195: note = MG160-275 reverse transcriptase
MKVHVGHSCLASVDLTQFFPSVTRTMVARSLRKLGYPDRKAFNTAMESCVVAGGQKFLPYGFPQSMCLATLVVENSALGSTLKSAVAAGVSVSMFVDDIIISANNDDLVVEYFEKIQVSARDSGFQVSASKVTPPGDEVASFNCRVSDSIELLPQRIERFKEQLQFASDPGKAAILRYVSGLNQQQHDELLAFIA

SEQ ID NO: 1010 - protein, 246 aa, synthetic construct
  source 1..246: note = MG160-276 reverse transcriptase
MFENFKYSYWKNGKPIFAPSERGLAWGEKVKGKVEELYKFDDFVYHFKDGSHVKALHEHRKNSYFCRVDIERFFYSIRRNRLKRLLKDIGIRKAEEFAKWSTVKNPYPEAGYVLPYGFIQSPILATLVLTESAVGGYLRRVNSDGITVSLYMDDICLSSNDAAELGRSFDGLKAAVGEAGFALNGDKTREPAKVIDIFNCSLERGSTEVLPERIDEFYSVYRTVASVEGFETYVDIVKSHTWRAKK

SEQ ID NO: 1011 - protein, 252 aa, synthetic construct
  source 1..252: note = MG160-277 reverse transcriptase
MARSFEKFYEIKEGRFVFEPTTKARKIGEEILNDLFKIWSPPDHFYQLGKSKGHVEALRVYSKGRLFASIDIENFFGSVTRTKICRSLRAIGIDDKKAFSIAYDSVVDFGGTKTLPYGFIQSVALATLVMECSALGSAIRQAIKSNVMITVYVDDIILSGEHAETLQHHFDEFVRTKNAAKFNISAKKCQNVSDKIEVFNCNLSKSHISTTPKRMKQFKVDYAHASDARRASIEKYITAVNKSQVAELGRLH

SEQ ID NO: 1012 - protein, 289 aa, synthetic construct
  source 1..289: note = MG160-278 reverse transcriptase
MRKKHNQDLVLGYIYLAIEALRFGSRVLEFLNVVINYFIFVYLKYKSKFQLKPSVWVFVPTEESVAKGKGFKFAVEKYWKAPINYYHLRQGGHVEALKSHLQNSHFIHLDIQNFFGSINRTRVTRCLKGLFSYTVAREIANYSTVSHPVDKNSILPFGFVQSPIIASLCLDNSALGRYLRMLSKNNDVTVSVYVDDIIISSNDALLLKDVMTNIKISAARAGFDLNEKKEEGPSAKITAFNIELANQSMEITVERMRQLMDSYENTDSENVKKGIAGYIMSVNELQKLS

SEQ ID NO: 1013 - protein, 256 aa, synthetic construct
  source 1..256: note = MG160-279 reverse transcriptase
MHESFESRWISRFEIKPNAWVFVPTSEFIRYGTEIKQTVAKRWHSPRYYYHLRDGGHVSALKKHIKHKHFIHLDIQNFFGQINRSRATRCLKDYFSYSEARKIAIKSTVALPRSAIKKYILPFGFVQSAIIASLCLHKSTLGKHLHQLAKKSDLTVSVYMDDIIISSNNQHQLEEVLVSVEVAAEKAGFPLNKTKQEGPCDQITAFNILLTENELKITDERLDEFIEAYKASTNPNQKDGIFNYINCINSNQVSFL

SEQ ID NO: 1014 - protein, 244 aa, synthetic construct
  source 1..244: note = MG160-280 reverse transcriptase
MPVKFQNFSHSFNIKAKPVFVPSERGYLIGRDIKQQVNERYDFPTFYYHLQSGGHVAALHAHRENRFFCKIDIDSFFYRISRNRVTRALKDIGVARSLHYAKWSCVKSPLAPPAFALPYGFVQSPILASLVLSKSVLGDWLREKSQHLCVAVYVDDISLSGKNLDVLQEAYNELHQMAAASNFPLNLRKSVAPTALLEVFNCTLRLGATTVDAKRITAFHALDPNDASIDAFERYCATVAEGNL

SEQ ID NO: 1015 - protein, 259 aa, synthetic construct
  source 1..259: note = MG160-281 reverse transcriptase
MIAKWESRFELKPNKWVFVPTAETIAVGRKIKKSIKECWKPPSYYYHLRSGGHVSALKSHLKHAAFLHLDVQDFFGSINKTRVTRCLKSKVGYAIAREWANISTVIDPRDKKKYIIPFGFVQSQIVAALCLHESALGACIHTLQKNKKLVVSVYVDDIIVSSDNTDLLSETLEKLQEAAKRAGFALNSKKQEGPSASINAFNIVLSHAQLEINEDRLRQFINALEEAISTPQRLGILNYIATVNNDQAEGLAEFARPNP

SEQ ID NO: 1016 - protein, 274 aa, synthetic construct
  source 1..274: note = MG160-282 reverse transcriptase
MSKLITKSFIERELGLTQAEFATLCDGAPRCYKYEAHPKANGEHRIISKPYSRIKIHQKKLNKALSELPIEAGICGGPGTTIMAAMKPHCKNPLLLTIDLKNFFPSIDQRRVNDLFAQILDDSSYASSFTKLCTTRRAMPQGAPTSATIARLIIEPAFVDLKKALIDMHPSCEVTAWVDDIMISGPLGIRRAKKTIGKVFERHGFTINHDKTKVMFSAQDRTNLGITLKDILEPSAENLAKYEKCLKETSDKEESIRGYINFFKDIAKANQVCA

SEQ ID NO: 1017 - protein, 260 aa, synthetic construct
  source 1..260: note = MG160-283 reverse transcriptase
MPFSSKWVFKYPIKSYSWIFIPTESTIKNGKIIKSIIEKNWVAPNYFYHLKKGGHVKALKIHKENSFFIHLDIQDFFGHINKSRVTRCLKSFLGYERARKIAKESTVNIFKKTSKKTISILPFGFVQSPIIASLCFHKSKLGKYLHNINGKHGVYVSVYMDDIIVSSPNKLNLEKIFYNIEVLSVYSKFPLNIEKKDEPSNQITAFNIHLSHNLLEITDIKLNEFKNKVKDSQNIYEINGIISYISSINKEQAKFFVNNI

SEQ ID NO: 1018 - protein, 260 aa, synthetic construct
  source 1..260: note = MG160-284 reverse transcriptase
MGTSMHRWVSRFELKPERWVFIPTENTIKIGIEIKTAIMERWTPPYNYYHLQKGGHVSSLRDHIDNTYFACLDIENFFGSINKSRVTRCLKTFFSYEVARKFAVASTVVDPNGCDPKKFILPFGFVQSSLVSSVCLYESTLGRKIKQINNRKDSVHVSVYVDDIVISAKSEDLVMSAMIEIKDSADKSRFKLNVDKEFGPSNNVTVFNIKLSNRTLEVEQDRLLQFRQKFKSSSEKNVRSGIIGYINSINSDQAELIQID

SEQ ID NO: 1019 - protein, 256 aa, synthetic construct
  source 1..256: note = MG160-285 reverse transcriptase
MKQKWTTKFELKPGRWVFVPTVESVRVGKEIKSAIEHRWSPPGHFYHLRAGGHVAALNAHLHSSVFLKVDVKDFFGSISRTRVARCLKKRFGHVTALEWAHASTVRSPTDVARSIIPFGFVQSPIVASLCLAESALGSFLRKLARGGQVRVSVYVDDVILSCKDAGALNNALLMKLQRAAGRSRFDLSVEKTQGPAPAIKAFNIELCHGAIRIEDGRMHEFIEALKSSTSAPQRAGILGYIGSVNPDQRMEAEGVV

SEQ ID NO: 1020 - protein, 257 aa, synthetic construct
  source 1..257: note = MG160-286 reverse transcriptase
MKKVSQRWSSKFQIKPGSWVFVPTDEAVKYGNFIKASIEARWSPPNYYYHLRDGGHVKALSSHLEHEFYIHLDISNFFGCINKTRATRSLKRYWSYDAAREMASQSTVRDPNSPQNARYILPFGFVQSPIIASLCLRNSKLGSYLAKINKTAEVTVSVYMDDIIISSNDAQQMVVILADIKPISELSKFPLNPKKEEGPSGVITAFNIKLSKGVLRLTNERLNAFKAAYRKSDNFNVLSGIVGYVSTVNFDQANEIF

SEQ ID NO: 1021 - protein, 286 aa, synthetic construct
  source 1..286: note = MG160-287 reverse transcriptase
MISRFEEIFGVKEGKINRILRNRSYNKYSYRKKSGGIRVLLEPDEDLKELQRELYQNLAVRYPILDGINGVKDTSIFDHIDPHLSKKIILTTDIEDYFTNVGKAYVIRKLEEQGVLNETMRELIACVVTFNNQLPQGAPSSTFMACLTIQPLFRSIMKFSKEKGIDITLYVDDWAISGQNKKGVTEVFNKLESLLSKDGLFVSPEKTKIMTGTKKKIVGVVVGDKMRVNRKYIQEVRDDILTYSKQVPLRQKELMEEVKGKLNFIKSLNDPRAENLIELFKKETLD

SEQ ID NO: 1022 - protein, 281 aa, synthetic construct
  source 1..281: note = MG160-288 reverse transcriptase
MAPQEYTLCQLANNLGFTTVQTLQAFAKKAPSCYGRVVIPKDKQNPTKGLREINPPTEELKQIQRLLLEKVLYHINTLDNMGAGRGSSTAKIMALHTKKDMMLCYDISNFFPSVKKWTIKRCLRDRGFPWDVIDVIANLTTFNNHLPQGGPCSTQLGKIIISPPAKHLLRLLKNYGTAVDVSFWVDDIIISGPRSLKNLEKSDNVYNIFSRYGFQLKREKTKIQPKTDEQNAFGLRVDRGIVEPDSEFICSYSTEISLNGRNSKRAKGMCNYMKSVRKIMR

SEQ ID NO: 1023 - protein, 335 aa, synthetic construct
  source 1..335: note = MG160-289 reverse transcriptase
MRFISQTFRRIKMNHRYCRIIFAGYYTVKFLNELIDLLVKILTLFNYFLPKKQMSFPLWSHRYKSKKGKWIYIPTDECRIKGANIIRLLSTFWHSPSYFYHLQKGGHIAALKLHLYNGSDLRQIKNSRYFSYFDITNFFGSINKNKVIKATKCFVGYQMAKDIANASTVTNIGSSEKVLPFGFVQSPLIGSIVLDQSYLGRELSKLSKLHNLKLSVFVDDIIISSDNKKLIQSASERILKAIEKSNLHLNQEKSSICNGSMKVFNIIAKYNCLYLTEHRLTVFAEKLINNSSDYFVVEGIVNYMKMVSPHQSKRLIKEIVCEIGTSRAGFIAKIP

SEQ ID NO: 1024 - protein, 282 aa, synthetic construct
  source 1..282: note = MG160-290 reverse transcriptase
MSFPLWSHRYKSKKGKWIYIPTDECRIKGANIIRLLSTFWHSPSYFYHLQKGGHVAALKLHLYNGSDLRQIKNSRYFSYFDITNFFGSINKNKVIKATKCFVGYQMAKDIANSSTVTNIGSSEKVLPFGFVQSPLIGSIVLDQSYLGRELSKLSKLHNLKLSVFVDDIIISSDNKKLIQSASERILKAIEKSNLHLNQEKSAICNGSIKVFNIIAKYNCLYLTEHRLTVFAEKLINNSSDHFVVEGIVNYMKRVSPHQSKRLIKEIVCEIGTSRAGFIAKIP

SEQ ID NO: 1025 - protein, 267 aa, synthetic construct
  source 1..267: note = MG160-291 reverse transcriptase
MNTEITEEQLAKSLNLSLSELREWISCAHKSYGRMVIIKPNGKKRILYPPTKQLKFIQRKLLRNILSKIPTPQEMCSGKGKSTKDIMQKHVNKNMLIRIDLSDFFPNIKAHKIFTLLRERGFSQKVARIITKLTTFRGSLPQGSPCSPQLACLALAPAAKHIINLFQFPVSITFYVDDIIISGSGSTQNFRETIYNILERNGFVVNRAKTKIMPRGTEQSALGLRVDHGKVEPDSQFMEKYQKARHENANPESIRGMRKYLKYIISK

SEQ ID NO: 1026 - protein, 282 aa, synthetic construct
  source 1..282: note = MG160-292 reverse transcriptase
MSFPLWSHRYKSKKGKWIYIPTDECRINGVNIIRLLATFWHSPSYFYHLQKGGHLAALKLHLYNGSDLRQIKNSRYFSYFDITNFFGSINKNKVIKATKCFVGYQMAKDIANTSTVTNIGSSEKVLPFGFVQSPLIGSIVLDQSYLGHELSKLSKLHNLKLSVFVDDIIISSDNKKLIQSASERILKAIEKSNLHLNQEKSAICNGSIKVFNIIAKYNCLYLTEHRLTVFAEKLINNSSDHFVVEGIVNYMKRVSPQQSKRLIKEIVCEIGTSRAGLIAKIP

SEQ ID NO: 1027 - protein, 279 aa, synthetic construct
  source 1..279: note = MG160-293 reverse transcriptase
MGNTKELEKLLTEYPADAGVFCTTEPKRDDTSRPIVKPNKSLNKWLKSVKCALYRQCSDWPTFIHGGIKKRSYVSFARPHANKNTVIAIDIRNCFGSITQREVQQALSDKLGLSSGLASRLAVKLCYRNRIPQGFATSSYLTNLYLNDTLLQINQLLRHKRVDMTIYVDDIALSSQQVNAAEVINLVAVQLSRAGLAVSKAKIKVMHAHAPQIICGLLVNKGVTLTRQKRKEIFSDVANGRMTKTSLEGWLANLNMIDKRLMRKLQAYAIQKGIIRAGA

SEQ ID NO: 1028 - protein, 279 aa, synthetic construct
  source 1..279: note = MG160-294 reverse transcriptase
MGNTKELEKLLAEYPTDASVFCTTKPKRDGTSRPIVKPNKSLNKWLKSVKRVLYRQYSGWPTFIHGGVKKRSYVSFARPHANKNTVIAIDIRDCFGSITQREVQRALIDKLGLSSGLASRLAVKLCYRHRIPQGFATSSYLANLYLNDTLLQVNRLLRRERVDMTIYVDDIALSGQQVNAAEVINLITIQLSRAGLAVSKAKIKVMHAHAPQIICGLLVNKGVALTRQKQKEIFSDVANGRMTETSLEGWLANLNMIDKRLMRKLQAYAIQKGIIRADT

SEQ ID NO: 1029 - protein, 267 aa, synthetic construct
  source 1..267: note = MG160-295 reverse transcriptase
MNTEITEEQLAKSLNLSLSELREWISCAHKSYGRMVIIKPNGKKRILYPPTKQLKFIQKKLLRNILSKILTPQEMCSGKGKSTKDIMQKHVNKNMLIRIDLSDFFQNIKAHKIFTLLRERGFSQKVARIITKLTTFRGSLPQGSPCSPQLACLALAPAAKHIINLFQFPVSITFYVDDIIISGSGSIQNFRETIYDILERNGFVVNRAKTKIMPRGIEQSALGLRVDHGKVEPDSQFMEKYQKARHENANPESIQGMRKYLKYIISK

SEQ ID NO: 1030 - protein, 255 aa, synthetic construct
  source 1..255: note = MG160-296 reverse transcriptase
MPSLWSNKFEIKPGYWVFEPSEECRVIGGDLKNKIFGKWKPPDYYFHFQDGGHVAAAKSHFGNVFFLKIDISKFFCSINRSRITRNLKEFFGYADARDYAVKSTVRDPNNKNKFFLPYGYVQSLCLASLALSKSQLGVELNKIRRSNGCAISVYVDDIIISSKNIDLLYGIKDVVIESARKSKFFINENKTEGPSTLITAFNLDISYNSVKINQTRFYELLDNHRDSDLIAQKEGIEGYVRSVDLNQYQLFMSLI

SEQ ID NO: 1031 - protein, 290 aa, synthetic construct
  source 1..290: note = MG160-297 reverse transcriptase
MRLFRFIGKIMIPQEYTLYQLADYLNFSSVQALQTFSKQASSRYGYVVIPKDKQNPNKGSRVINPPDKELKKIQRLLLKKVLSQIVTPSNMGAGQGSSTAQIMALHTGKDLLLCYDISNFFPSVKKRMIKQCLRDRGFLWGVVDVIANLTTFKDHLPQGAPCSTQLGKMVISSPAKHLLQLLENYGTSIDVSFWVDDIIISGPTSLRNLEKSGNVYDIFSRFGFILKKEKTKILPKTSEQNALGLRVDRGIVEPDSMFMFSYSTEISHNGYNSTKARGMRSYMRSINRRK

SEQ ID NO: 1032 - protein, 257 aa, synthetic construct
  source 1..257: note = MG160-298 reverse transcriptase
MSLDVLRWEHKFELKPGIWIYVPSTDGIKCGEKILREVRSKWIAPLYFYHLRTGGHLKAARLHLKSDFLAVVDIKQFFQSTSRSRITRVLKNYFTYSQAKEISKLSTVRNLTGTPHQHVLPFGFVQSPILATLCLDKSHLGGLLRRLSKHPDMKLSVYMDDLIISSNDFVQLQTAYDEILAAMEKSGYQANMIKTQAPSSLIKVFNLNVSKGAMKVTSQKMSDFLIDFYASDYEPHKIGVKNYVESVNPEQAKLLKL

SEQ ID NO: 1033 - protein, 245 aa, synthetic construct
  source 1..245: note = MG160-299 reverse transcriptase
MIENYKCKFKFHGKFIFVPSLICDKKAKRLLAFGASIELPNYFFHYRPGGHVDALHRHLESRHFFRIDLKNFFYSIGRNRISRLLRQHHFPGNARTYAEWSTVRNPYPDGPRYALPIGFRQSPLLASLVLYDSALASAIEDAYARGVFVSIYFDDLIGSSNEIKELQVTYDGILAACVQANLIANPDKLVSPADAIVAFNCDLTHGRAQVTDARIQRFVDEHRGAQAEEAFLAYCERVERRNHPA

SEQ ID NO: 1034 - protein, 242 aa, synthetic construct
  source 1..242: note = MG160-300 reverse transcriptase
MLENYKFKFRARGKFIFVPNERCVRKGERIMAFVKKRAKLPDYFYHYQPGGHVAALHSHVPHTLFFKIDIQNFFYSITRERVTRALREYGLQGAHTFARWSCVANPMPGPQFVLPIGFVQSPLLASLVLMRSPVAIAIERAKDSGVTISVYLDDIVGSHSDLGTLTAAYEDIRQACATSNLIPNPDKLVSPAAAIVVFNCDLTHGRALVTEDRLAEFLAVPHTDASRQAFDQYRNRVAAAHG

SEQ ID NO: 1035 - protein, 244 aa, synthetic construct
  source 1..244: note = MG160-301 reverse transcriptase
MIENYQFKYRSRGKWFFVPNDKCERRGRRMLAYFKRRVAFPDYMYHFKKGGHVAALHAHLNNHFFFKIDIQNFYYSIARMRVTRALRQWGYPGANTFAMWSCVRNPLPGPKHALPIGFVQSPLLASLALMKSEVADAIERAMAKGVCISVYLDDFIGSHDDEALLTAAYEDIRDTCVAAGFIPNPSKLVSPQAAITAFNCDLTNGSAEVTAARVAKYFSRPDRTPLSDVGFDEYRDLVRSQNTP

SEQ ID NO: 1036 - protein, 240 aa, synthetic construct
  source 1..240: note = MG160-302 reverse transcriptase
MFENYRAKFQHRNKFIFVPNDEANRRGEIILRFVERTVNFPDNFYHYKSGGHVAAIHGHLAHSYFFKIDLERFFYSISRSRVSATLRHFRFGDARDFAKWSCVRNPYQEGGYALPIGFVQSPALATLTLMKSPLLPAIAEAERQRTFTSVYLDDIICSGNDSSVLTSIYHSFLEAIERASLRAHKLAQPSPNIRAFNCDIRAGYAAVSAERIEKFHREGRGAAAEIAFERYCENVSGMNR

SEQ ID NO: 1037 - protein, 201 aa, synthetic construct
  source 1..201: note = MG160-303 reverse transcriptase
MEALKSHLNSSSFVHLDIQNFFGSINKTRVTRCLKGLFSYVEARAIANASTVIHPDEQKLILPFGFVQSPILASLCLAKSALGRCIHELPTKYGDLVVSVYVDDIILSCNDEANLHLATAEVKQCAKRSGFELNPKKEEGPAQKITAFNIELSSLSLEVEPARYAEFFFAFAESTSLSQREGIQGYINTVNLLQAESLGPA

SEQ ID NO: 1038 - protein, 218 aa, synthetic construct
  source 1..218: note = MG160-304 reverse transcriptase
MIQYLERRVKFPEYFYHYKSGGHVAALHAHLQNTFFFKIDVQNFYYSIARMRVTRALRSWGYPGAGTLSKWSCVANPIAAHPQYVLPIGFVQSPILASIVLMKSDVSKAIERAMANGVLVSVYFDDFVGSHIDEGVLRAAYIDILDTCVSAKLVPNPAKLVPPNAAIKVFNCDLTHGSANVAAERIGKYMTSAKRSPASDVAFEQYRVLISSANITLS

SEQ ID NO: 1039 - protein, 247 aa, synthetic construct
  source 1..247: note = MG160-305 reverse transcriptase
MIENYKHKYRSRGKFIFVPNERCERRGRRMLKFFSKLDFPAYFYHYKKGGHVAALHAHIENALFFKIDIQNFYYSIARMRVTRALRHWGYPGAGTFSKWSCVFNPIASVPRHVLPIGFVQSPLLATLVLMKSTVVEAIERAIANGVCISVYLDDFIGSHNDEEILKVAYQDIHDTCVSAGLVPNPAKLEPPSVAITAFNCELTHRMARLTEERTTKYQSRPDRTATTDAAFEQYRLLVASENALTSE

SEQ ID NO: 1040 - protein, 251 aa, synthetic construct
  source 1..251: note = MG160-306 reverse transcriptase
MLDTYSHKFRTPRGLLVYVPTVFGAGEGRSIVRKVQGRWTSPRHFFHFRDGGHVAACRYHVRQQFFAHMDIKAFFNSVTRSKVHRALRRIGFNQRDAVGISELSTVEDITTPGRYALPFGFIQSMILATAALDRSRLGKELRRARRYRVRISVYVDDIVLSGSNVADLAGYMAVLNEAADEAGYSFNKSKASGPAGATKAFNVLLSSNDMRISPDRMVEFELALATETEEVRIAVLNYIRTVNRGQADALL

SEQ ID NO: 1041 - protein, 244 aa, synthetic construct
  source 1..244: note = MG160-307 reverse transcriptase
MIENYQFKYQSRGKWFFVPNEKCERRGRRMLAYFKRRVAFPDYMYHFKKGGHVAALHTHLDNNFFFKIDIQNFYYSIARMRVTRALRQWRYPGANTFAMWSCVRNPLPGPKHALPIGFVQSPLLASLALMKSEVADAIERARAKGVCISVYLDDFIGSHDDEALLTAAYEDIRDTCVSAGFIPNPGKLVSPQAAITAFNCDLTNGSAEVTAARVAKYLSRPDRTPLSDAGFGEYQDLVRSQNMP

SEQ ID NO: 1042 - protein, 274 aa, synthetic construct
  source 1..274: note = MG160-308 reverse transcriptase
MEKFKLPSNVTELAKVLGLTENDLQKLAHAAPNLYHTKCVPKPRGGFRIINPPLKHLKEIQGKILRVILNQIPVHQTLHSGPKTSTKSAAKAHVKQPVVIALDIQDFFPSVQSKTVCRAFEANGFSEDVASLLARLTTHKGKLPQGAPTSPAIARIVLCDVCKEFEALLNSISPHARTTIYVDDVTISGPVGLERLIPAIISIFKRHGYSVNPLKKKIMRQNEEQIVLGLRVNCRVEPSSEFEATLKLERQKLHPRDPKLKGLEAYKNYITRGD

SEQ ID NO: 1043 - protein, 245 aa, synthetic construct
  source 1..245: note = MG160-309 reverse transcriptase
MLENYECKFQTRGKIIFVPNERSVRKGRRILKFFSKFEFPDYFYHYKSGGHVAALHAHLENKLFFKIDIQNFYYSIARMRVTRALRSWGYPGANTLAKWSCVANPYPGPRHVLPIGFVQSPLLASLVLLKSPVAEAIERAIKNGVCISVYLDDFVGSHNDPAVLEAAYDDIRDTCVAARLVPNPAKLIAPRAAITAFNCDLTEGSVLVTTERVAKYYASTARTVETDAAFEEYRKLIASTNKAAI

SEQ ID NO: 1044 - protein, 240 aa, synthetic construct
  source 1..240: note = MG160-310 reverse transcriptase
MFENYRAKFQHRNKFIFVPNDEANRRGEIILRFVERTVNFPDNFYHYKSGGHVAAIHGHLAHSYFFKIDLERFFYSISRSRVSATLRHFRFGDARDFAKWSCVRNPYQEGGYALPIGFVQSPALATLTLMKSPLLPAIAEAERQRTFTSVYLDDIICSGNDSSVLTSIYHSFLEAIERASLRAHKLAQPSPNIRAFNCDIRAGYAAVTAERIEKFHREGRGAAAEIAFERYCENVSGMNR

SEQ ID NO: 1045 - protein, 229 aa, synthetic construct
  source 1..229: note = MG160-311 reverse transcriptase
MIEAPFPPLKAAQSKLRVTVLDNIPVHSDLHGVRGTSQITAAAVHRSQAVVITMDIKDFFPSVTSTMVKEALASHSVDSSVADVICRLTTRKKRLPQGAPTSPVLARIVITPAVERLRGLLASISPACKISVYVDDISLSGPMGLQRAIPTVTKILREHGFEFSEKKTKIRKGDEDKEVLGLRVSCRLEPGAAFRKKLEVARQSLPSTSPKLKGLESWVQTVSRANRNS

SEQ ID NO: 1046 - protein, 274 aa, synthetic construct
  source 1..274: note = MG160-312 reverse transcriptase
MEKFAAPGSVVELARILELDERGLRSLADAAPNLYHTKRVPKKSGGFRIINPPLKHLKDVQKRILRKVLNPIPIHKMLHSGPETSTKSAAKAHVNQPVVIALDIQDFFPSVHSKTICHALEANGFPEDVACLLTRLMIHKKRLPQGAPTSPAIARIVLCNICHQFQALLNSVSPHARATIYVDDITISGPPGLEKLIPTIISIFRRNGYSVNPSKKKVMTQNEEQIVLGLRVNRRVEPSSEFEATLKSERQKRQPKDPKLKGLESYKSYITRRD

SEQ ID NO: 1047 - protein, 245 aa, synthetic construct
  source 1..245: note = MG160-313 reverse transcriptase
MIENYKYKYRSRGKIIFVPNERCERRGKRMLKFFSKRVDFPDYFYHYKSGGHVAAIHAHIDNSLFFKIDVQNFYNSIARMRVTRALRAWGYPGAGTFSKWSCVANPINAAPRHVLPIGFVQSPLLASLVLMKSDVSGAIERAIANGVVITVYLDDFIGSHDDMATLTHAYTDIREACVAAGLLPNPTKLVPPSVAITAFNCDLTYGSAIVRADRVAKYMASPNRTVLSDAAFEQYRNLVARENTS

SEQ ID NO: 1048 - protein, 245 aa, synthetic construct
  source 1..245: note = MG160-314 reverse transcriptase
MVLAFENFRYSGKTPKGKPYFVPTDRCRDVGSELMELVRARIKFEHHYYHFSKGAHVAALHSLREHRYFAHIDLKNFFYSVGRNRVKAALKAIGVPRAEHYAKWSTVRNPFGEPRYALPYGFPQSPLLASLVLRGSALGTAIQRLPPEIHRSVYLDDIAISANDMNVLYEAFSSLIASVEAANFVLNDEKASGPAPEVRIFNCDLANGKSTVTASRIAEFYAEDGSDESVAGFERYRESVAAGNL

SEQ ID NO: 1049 - protein, 274 aa, synthetic construct
  source 1..274: note = MG160-315 reverse transcriptase
MSSADRIISLLENYPEDSRAFRSVELKPNGKPRLIAKPNKPLRKWLRSMNKELGSYFGDWPTFMHGGIKKRSYITCARQHVNKRCVVTIDIKDCFDSITEQQITAVLQSKLNLEPETSKKLAHMVSFRSRLAQGFPTSNFICNLYLLDALSKLNEYFKKQNLSFGNYVDDIVVSGKVKHPDKVINEVAKELSRIGLKMNKVKVKVMPSHKQQTVCKLLVNKRLSLTKGLKRELHSQLAKGEMTEASLAGWLANLRTIDPMFAEKLQNFALKKLT

SEQ ID NO: 1050 - protein, 243 aa, synthetic construct
  source 1..243: note = MG160-316 reverse transcriptase
MIENYAFKYRSRGKWIYKPKKGCDRRGQQVIAFIECCVKFPEYFYHFRSGGHVAALHEHLKNRFFFKIDIQNVFYSIARNRVHRALAKCGMRGAPTFAVWSTVRSPYPRGPKYVLPIGFRQSPHIASLVLMHSPVVTTIEDERAKGVLISVYLDDIIGSSEDEEALKAAYDAIKVACVTANLTPNPAKLVEPNPKVVAFNCDLTNGAAEVTVERIAKFYAKFPSIRSRVSFEAYVARVASENA

SEQ ID NO: 1051 - protein, 242 aa, synthetic construct
  source 1..242: note = MG160-317 reverse transcriptase
MLENYKFKFRARGKFIFVPNERCVRKGERILAFIKKRAKLPDYFYHYQPGGHVAALHSHVPHTLFFKIDIQNFFYSITRERVTRALREYGLQGAHTFARWSCVANPLPGPQFVLPIGFVQSPLLASLVLMRSPVADAIERAKSLGVTISVYLDDIVGSHNDLGVLTAAYDDIRQACATSNLIPNPGKLVSPAAAIVVFNCDLTHGHALVTVDRLAEFLAVPHTDASRQAFDQYRSRVAAANG

SEQ ID NO: 1052 - protein, 242 aa, synthetic construct
  source 1..242: note = MG160-318 reverse transcriptase
MIENYKFKYRSRGKYIFVPTEGCERRGRRIISFLYRRVDFPDYFYHYKPGGHIAALHAHLPNRFFFKIDIQNFYYSIARMRVTRALRSWGYSGAGTLAKWSCVINPLAGPRYVLPIGFVQSPLLASLVLMKSPVSQAIERAIANGVCVSVYLDDFIGSHNDRNVLEVAYDDIRETCAAAGLLPNPGKLIAPSEAITAFNCELKYGSAEVTDDRVGKFLDGARSELSRAAFQNYRQRVASRNF

SEQ ID NO: 1053 - protein, 273 aa, synthetic construct
  source 1..273: note = MG160-319 reverse transcriptase
MTACAKMSVTELSCMIGMPEDVLRRLAGKAPHLYRCWDEPKKDGSKRRIEAPFPKLKEVQHLLVDRLLGELPVNTSLHGRPGTSQISAARLHVARQTLTTMDLKNFFPSITSRHVQKALGAHGFTADVAELICRLCTRKKRLPQGAPTSPVLARLVISPSLERIRGAVTKASPHARVTQYVDDLAISGPDGIERLAGLAKKIFAQARLSVNPKKTRIMRGSEAKEVLGLKVNKRLEVSDKFAAELTEARRTMAPSDRRLLGKLAWKRRVERSN

SEQ ID NO: 1054 - protein, 244 aa, synthetic construct
  source 1..244: note = MG160-320 reverse transcriptase
MIENYEFKYRSRGKWIYKPKKGCDRRGQQVIDFIERCVKFPEYFYHFRSGGHVAALHEHLKNKFFFKIDIKNFFYSIARNRVHRALAECGMRGAPTFAVWSTVRSPYPHGPKYVLPIGFRQSPHIASLVLMCSPVVAAIEDQQAKGALISVYLDDIIGSSDDEGALKAAYEAIKVACVAANLMPNPDKLVDPKPKIAAFNCNLTHGAAVVTEERIAKFYTQFPSVTSRISFEAYVARVASENIA

SEQ ID NO: 1055 - protein, 288 aa, synthetic construct
  source 1..288: note = MG160-321 reverse transcriptase
MLRVYIEKVNPINQLLDLLQHYPPDGTVRRESITKPDGSFRYLAKPNKALGLWLRQMNAALNACYDVWPTYIHGGRKKHGYVSYARPHVGKSCVVTIDIKKCFDSITMQQIADALEKHLQLSAKDAKRLAHCVCFRGILAQGFSTSNFICNLVLLDALATMNDRLEPRQIDLTNYVDDLALSGDIAKPDEVINQITLALSRAGLSVKKAKIHVMPANKRQIICGLIVNKRLTVSKEKKQELVTAARTGSMSKASIGGWVANLNSVDPTFSNKLRDCAAKVLPEKSDRS

SEQ ID NO: 1056 - protein, 244 aa, synthetic construct
  source 1..244: note = MG160-322 reverse transcriptase
MIENYQFKYRSRGKWFFVPNEKCERRGRRMLAYFKRRVVFPDYMYHFKKGGHVAALHAHLNNHIFFKIDIQNFYYSIARMRVTRALRQWGYPGANTFAVWSCVRNPLPGPKHALPIGFVQSPLLASLALMKSEVADAIERARAKGICISVYLDDFIGSHDNEALLTAAYEDIRDTCVAAGFIPNPGKLVSPQAAITAFNCDLTNGSAEVTAARVAIYFERPDRTPLSDVGFDEYRDLVRSQNTP

SEQ ID NO: 1057 - protein, 242 aa, synthetic construct
  source 1..242: note = MG160-323 reverse transcriptase
MLENYKFKFRARGKIIFVPNERCVRKGERIMAFVKKRAKLPDYFYHYQPGGHVGALHSHVPHTLFFKIDIQNFFYSITRERVTRSLREYGLQGAHTFARWSCVANPMPGPQFVLPIGFVQSPLLASLVLMRSPVADAIERAKDSGVTISDYLDDIVGSHSDLGTLTAVYEDIRQACATSNLIPNPDKLVSPAAAIVVFNCDLTHGRALVTEDRLAEFLAVPHTDASRQAFDQYRSRVAAANG

SEQ ID NO: 1058 - protein, 242 aa, synthetic construct
  source 1..242: note = MG160-324 reverse transcriptase
MLENYKFKFRSRGKFIFVPNERCVRKGERIMAFVAKRAKLPDYFYHYQPGGHVAALHSHVPHTLFFKIDIQNFFYSIARMRVARALRDYGLQGAHTFARWSCVSNPLSGPKFVLPIGFVQSPLLASLVLMRSPVADAIERAKNSGATISVYLDDIVGSHNDHGTLTAIYDDIRQACVTSNLIPNPNKLVSPTAAIVVFNCNLAHGSALVTEDRLAEFLAAPRTDASRQAFDQYRNRVAAANG

SEQ ID NO: 1059 - protein, 248 aa, synthetic construct
  source 1..248: note = MG160-325 reverse transcriptase
MPVQFQNYEYSYLRGDKPVFAPSPLGKRIGEDIKGQVEAACEFDDFVFHLQQSGGHVAALHAHRAHEFFARVDIARFFYSIARSRVQRALAEIGILRARHYAKWSCVKNPYGDPTYALPYGFIQSPILATLVLMQSVVGNYLRSISTGGLISVSVYMDDISLSSDSFDGLIAAFEKLKQKLAEAHFGLNPAKEREPSPAMDVFNCDLSRGTAGVQQKRIDLFYSQGHSPLSVAGFEDYCARVVDGNAS

SEQ ID NO: 1060 - protein, 274 aa, synthetic construct
  source 1..274: note = MG160-326 reverse transcriptase
MESTKPFFIVADVARALKINEDDLRRLANSAPRLYRISQLPKKSGGFRVIEAPLKHLKEVQKKVLSHILNRIASHPILHSGPATSTKTAARAHLRQPLVVTLDIQDFFPSIRAATVCRAFESNGFDNESSRLLTRLVTRKSRLPQGAPTSSSIARIVLFDLCEELQALLKTVSLHSRATIYVDDVTISGPIGLQRLVPTIVSMFRRYGYRLNQAKKKVMPSVEEQVVLGLRVNHRLEPCSEFEKTLEAERATRHPRDPKLKGLESYRRFVIQPS

SEQ ID NO: 1061 - protein, 215 aa, synthetic construct
  source 1..215: note = MG160-327 reverse transcriptase
MLAYFKRRVTFPDYMYHFKKGGHVAALHVHLNNHSFFKIDIQNFYYSIARMRVTRALRQWGYPGANTFAMWSCVRNPLPGPKHALPIGFVQSPLLASLALMKSEVADAIERARAKGVCISVYLDDFIGSHDNEALLTAAYEDIRDTCVAASFIPNPGKLVSPQAAITAFNCDLTNGSAEVTAARVAKYFARPDRTPLSDVGFDDYRDLVRSQNTP

SEQ ID NO: 1062 - protein, 242 aa, synthetic construct
  source 1..242: note = MG160-328 reverse transcriptase
MLENYKFKFRSRGKFIFVPNERCVRKGERIMAFVAKRAKLPDYFYHYQPGGHVAALLSHAPHTLFFKIDIQNFFYSIARMRVARALRDYGLQGAHTFARWSCVSNPLSGPKFVLPIGFVQSPLLASLVLMRSPVADAIERAKNSGATISVYLDDIVGSHNDHGTLTAIYDDIRQACVTSNLIPNPNKLVSPTAAIVVFNCNLAHGRALVTEDRLAEFLAVPRTDASRQAFDQHRNRVAAANG

SEQ ID NO: 1063 - protein, 253 aa, synthetic construct
  source 1..253: note = MG160-329 reverse transcriptase
MNPKWSSKFELKPGKWVFVPTADAVLEGKRIKKAIEKCWRPPSYYFHLRAGGHVEALRSHLAHDNFLHIDIQDFFGSISRTKVTRCLKDKFSYVIARSYANASTVSDPVIAKRIIIPFGFVQSQIVAAVCLAKSALGIYLDQLSLNPVVALSVYVDDIIVSTSDAVLLEKVLKDIEVAAKKAHFVLNADKQEGPAAVITAFNIVLEKGSMKVEADRIKKFEEALTTATSESQRAGIKSYVTSVNAAQGLAISL

SEQ ID NO: 1064 - protein, 223 aa, synthetic construct
  source 1..223: note = MG160-330 reverse transcriptase
MIVNYDFKYRARGKWFFKPNDKCVRRGDRMLEYFKRRVVFPDYMYHFRKGGHVAALHAHLNNKLFFKIDIQNFYYSIARMRVTRALRDWRYPGAGTFSKWSCVLNPLPGPKHALPIGFVQSPLLASLVLMKSEVADAIGRARANGVCISVYLDDFIGSHDDVAVLTAAYEDIRETCVKAGFIPNPTKLDDRFHETCLDGTGRNLFESSIYTEHGGFSSCYCGG

SEQ ID NO: 1065 - protein, 218 aa, synthetic construct
  source 1..218: note = MG160-331 reverse transcriptase
MQTKLRIAVLDKLPVHPNLHGVRGTSQITAAAVHRSQAVIITMDIKDFFPSVTAEMVREALAIHKANGSVADLICRLVTRKKRLPQGAPTSPAVARIVIAPAVERLRGLLASVSPTCKIAVYVDDISLSGPLGLQRAIPTVMKILHEHGFEFSERKTRVSKGDEDKEVLGLKVSCRLEPGTAFRQKLELARQSLPSTSPSLKGLESWPQTISRLSRLH

SEQ ID NO: 1066 - protein, 274 aa, synthetic construct
  source 1..274: note = MG160-332 reverse transcriptase
MEKFKLPSNVIELAKVLGLTENNLQELAHAAPNLYRTKREPKKSGGFRVINPPFKRLKDVQGKILRTILNKIPVHQMLHSGPKTSTKSAAKAHVGQPVVIALDIQDFFPSVQSKTICRTFEANGFPENVANLLTRLTTHKSRLPQGAPTSPAIARIVLCDACKEFETLLNSVSPYAKATIYVDDITISGPFGLERLIPTIISIFKRHGYSVNPSKIKKMTQSQEQIVLGLRVNRRVEPSSEFNVTLKSERQKLHPQDPKLKGLESYKNYIVRED

SEQ ID NO: 1067 - protein, 325 aa, synthetic construct
  source 1..325: note = MG160-333 reverse transcriptase
MVDKHGSEGQGEGPLRKGALRRIPRGFTALPDDWRWGRFHLAPIAIFGNMRNVARSFVKDGTRYFVLTKSYAGWRSLSEGARAAYDGEEEWQHLKERILSHWRPNAAFTTFSKRAHVAALRPHLDNKYFAIIDLKSFFDHVTRTKVCRALEAIGFARSDAFAVAGESTIRQGEKHTLPRGFRQSSLLATLALEKSLFGSALRGHRFGSRITVYSDDIIFSNNDPEALADEHSQAIELLQRSHFPINPTKTQTARTEVDIFNLRMSHRTLRFTDQRMWKFLEQAASFVKADNAENTLYVYEMLFGDYIRSINPEQEKRLRTSLGIA

SEQ ID NO: 1068 - protein, 244 aa, synthetic construct
  source 1..244: note = MG160-334 reverse transcriptase
MIENYKFKYQSRGKWFFVPNERCVRRGERMLKFFSKRVNFPDYFFHYKKGGHVAALHAHLQNALFFKIDIQNFYYSVARMRVTRALRHWGYPGANTFAKWSCVSNPLPGPKHALPIGFVQSPLLASLALMRSPVHDAIERAQANGVCISVYLDDFIGSHNDPAVLTAAYEDIRAACVDAGFIPNPTKLVPPSAAITAFNCDLTSGSALVTPTRVNKYLASPERTLMSDAGFAQYQALVAAQNVP

SEQ ID NO: 1069 - protein, 244 aa, synthetic construct
  source 1..244: note = MG160-335 reverse transcriptase
MIENYKFKYQSRGKWFFVPNERCVRRGERMLKFFSKRVNFPDYFFHYKKGGHVAALHAHLQNALFFKIDIQNFYYSVARMRVTRALRHWGYPGANTFAKWSCVSNPLPGPKHALPIGFVQSPLLASLALMRSPVHDAIERAQANGVCISVCLDDFIGSHNDPAVLTAAYEDIRAACVDAGFIPNPTKLVPPSAAITAFNCDLTSGSALVTPTRVNKYLASPERTLMSDAGFAQYQALVAAQNVP

SEQ ID NO: 1070 - protein, 242 aa, synthetic construct
  source 1..242: note = MG160-336 reverse transcriptase
MLENYKFKFRSRGKFIFVPNERCVRKGERIMTFVAKRAKLPDYFYHYQPGGHVAALHSHVPHTLFFKIDIQNFFYSIARMRVARALRDYGLQGAHTFARWSCVSNPLSGPKFVLPIGFVQSPLLASLVLMRSPVADAIERAKNSGATISVYLDDIVGSHNDHGTLTAIYDDIRQACVTSNLIPNPNKLVSPTAAIVVFNCNLAHGRTLVTEDRLAEFLAVPRTDASRQAFDQYRNRIAAANG

SEQ ID NO: 1071 - protein, 245 aa, synthetic construct
  source 1..245: note = MG160-337 reverse transcriptase
MIENYKFKYRSRGKIFFVPNEKCERRGRRMIQFFSKRMDFPDYFFHYKKGGHVAALHAHLANQLFFRIDIQNFYYSIARMRVTRALRHWRYPGAGTFAKWSCVANPGPGPRFAVPIGFVQSPLLASLVLMRSPVNDAIERARANGVCISVYLDDFIGSHNELDVLTAAYEDIRATCVATGFIPNPGKLVPPRSAITAFNCDLTNGSALLTADRIKKYLASPTRTAMSDAAFDQYKDLVGSQNTVP

SEQ ID NO: 1072 - protein, 274 aa, synthetic construct
  source 1..274: note = MG160-338 reverse transcriptase
MEKFKLPSSVIELAKVLGLTENDLQKLAHAAPNLYNSRPEPKKHGGFRIINRPFKHLKSVQQKILRLILNQIPVHQTLHSGPKTSTKSAAKAHVKQPVVIALDIQDFFPGVKSKTVCRAFEANGFPEDVADLLARLTTHKSRLPQGAPTSPAIARIVLYDVCKEFEKLLSSVSPHARATIYVDDITISGPLGLERLIPTIISIFERHGYSVNPLKKKVMTQNEEQVVLGLRVNCRVEPSSEFEATLELERQKRHSRDPKLKGLESYKNYITHGN

SEQ ID NO: 1073 - protein, 242 aa, synthetic construct
  source 1..242: note = MG160-339 reverse transcriptase
MLLEDAYPQELSKRRKTRLIEPPYENLKKVQKLFLDRVLSRMKVHPMLHGGKGASTKKAARCHIRKQLVITMDVQEFFPSIKSSMVRKMFVSRGMDEDAARVFTRLVTRGNHVPQGAPTSPCIGRLVLDPVAAELAKLLESIHSTSAGSIWVDDMTLSGPRGMVRLKSTVVGIFRRHGFSIHPDKMQVMFRDQEQESLGIGLNDGITAPNKYLEKLNEFAIEAPSSNPRLKGMRNYVRGLSG

SEQ ID NO: 1074 - protein, 244 aa, synthetic construct
  source 1..244: note = MG160-340 reverse transcriptase
MFLNYEYQWVRKGKFIFAPNDDCDRRAKQLIRFVEKSVELPVCFYHYRKGGHVAALHRHLENPFFFKIDIRNFFYSISRNRIASVLHRVGFPYARTFAKWSAVRSPYPDGPRYVLPIGFRQSPLLASLCLMRSPVMDVVAWAEEAGAFVSIYLDDLICSGPDEGALHDLYELFLDAFREANLTPHPDKIVAPTDALEVFNCELRQGVARVTPQRIAAFFEEPRGPEAISAFEAYCERVSERNAA

SEQ ID NO: 1075 - protein, 404 aa, synthetic construct
  source 1..404: note = MG160-341 reverse transcriptase
MSILSEKRTVRSIAKELGMSETGVRELAESAPRLYRQSKMVKKLGDVSTYKFSADDITNLPAVVKKLGRPIDSDTLSAYLNDRLSTNTRELMAGYPGGCDSALRAALVRDLNRALEHETIYNRARFSKIKLETETRRLIEKWVHGRLVERKVYGPALVRLNRMLLEDAYPEELVKRRKTRKIEPPREDLKKIQKRFLDKVLAKMEVHPMLHGGEGSSPKKAAAQHVKKPMVITMDVREFFPSIKSRMVRKMFLSRGMDADAAQVCTRLVTSGNHVPQGAPTSTCIGRLVLNPVALELEGLMKSVHHSSAAGIWVDDLTLSGPSGMTRLKGTVISIFKRHGFEIHPEKIQVMPRGEEQVSLGVRLNNGIGVPTAYLKKLGEFAKQVPSSNPSLKGMHAYVKGLSG

SEQ ID NO: 1076 - protein, 246 aa, synthetic construct
  source 1..246: note = MG160-342 reverse transcriptase
MPVHFQNFAYSFENQRGKPVFVPSQRGYEIGYELKERVENAFFIDEMFFHFRRGGHLGALHMHRANRYFARSDLQNFFYSISKHRVARALHDTGIAKAGHFAKWSCVKNPYAPPSYALPYGFVQSPLLATLVFSRSPIGAFLREIQGRTTVTVYMDDIAISSDSLDLLQEIFPLLQAKIEEAQFQINPNKTIAPCPSIELFNCGLELNRTAVTEDRVAEFYNEPRSGLSVEAFRRYCASVEHGNRP

SEQ ID NO: 1077 - protein, 244 aa, synthetic construct
  source 1..244: note = MG160-343 reverse transcriptase
MFLNYEYQWVRKGKFIFAPNDDCDRRAKQLIRFVEKSVELPDCFYHYRKGGHVAALHRHLENRFFFKIDIRNFFYSISRNRIASVLHRVGFPYARTFAKWSAVRSPYPDGPRYVLPIGFRQSPLLASLCLMRSPVMDVVAWAEEAGAFVSIYLDDLICSGPDEAALHDLFELFLDAFREANLTPHPDKIVAPTNALEVFNCELRQGIARVTPQRIAAFFEEQRGPEAISAFEAYCERVSERNAA

SEQ ID NO: 1078 - protein, 270 aa, synthetic construct
  source 1..270: note = MG160-344 reverse transcriptase
MLGTYNHKFILPKGQQVFVPSAASRQAGVVVHAEVRRRWHRPPHFYHLRPGGHVAALKTHVHNRCFATLDIHHFFDSVTRTKIHRALCSIGIEHRRAWEIAQESTVEKHRQRRDFSLPYGFVQSPALASLALDRGALGREMKTIARSNHTRLSCYVDDVILSGIEEEAVESSRLALIEAARQSGFAFNDTKSQRPGSEITAFNVALSNGTLAITGDRMREFEDDILRSPPAAVIAIIGYVRSINRAQADALVEVALTSPDDAVREAAAKA

SEQ ID NO: 1079 - protein, 246 aa, synthetic construct
  source 1..246: note = MG160-345 reverse transcriptase
MYRCYPKRKKSGGVRQIEEPFPILKNAQRKLCHLFLNGIPIHDCLHGHKGTSQISAAKNHVRQPIVIAMDIQNFFPSVRKGMINRALLSNGMNAAMSDRVCRLTTRKNRLPQGAPTSPVLARIVISPVLIRIENMLSNISLNCRFAMFVDDLSLSGPEGLRRAIPLIVRIFKQNGFNFRPEKTKVMKGSDEKEVLGIRVNERLEPGAEFRLKLDLARRDRKTSPDRRRALEAWRRKLITSGVSVSK

SEQ ID NO: 1080 - protein, 274 aa, synthetic construct
  source 1..274: note = MG160-346 reverse transcriptase
MKKFQLPDSAAKLAKVLGLTENDFQALAKAAPSLYRTKREPKKNGGFRIINPPFIHLKTVQKKILQAILNQIPIHQILHSGPKTSTKSAAKAHVKQPVVIALDIQDFFPSVQSKTVCRAFEANGFPEDVANLLARLTTHKGRLPQGAPTSPAIARIVLYDACKEFETLLNSVSPYAKATIYVDDITISGPLGLERLIPTIISIFKRHGYSVNPSKIKKMTQSEEQIVLGLRVNRRVEPSSEFNVTLKSERQKLHPRDPKLKGLEAYKNYISRED

SEQ ID NO: 1081 - protein, 245 aa, synthetic construct
  source 1..245: note = MG160-347 reverse transcriptase
MLENYECKFQTRGKTIFVPNERSVRKGRRILKFFSKFEFPDYFYHYKSGGHVAALHAHLGNKLFFKIDIQNFYYSIARMRVTRALRSWGYPGANTLAKWSCVANPYPGPRHVLPIGFVQSPLLASLVLLKSPVAVAIERAIKNGVCISVYLDDFVGSHNDPAVLEAAYDDIRDTCVAARLVPNPAKLLTPRAAITAFNCDLTEGSVLVTAERVAKYYASTARTVETDAAFEEYLNLIASANKAAI

SEQ ID NO: 1082 - protein, 253 aa, synthetic construct
  source 1..253: note = MG160-348 reverse transcriptase
MLNNYKYSFTEGSGRLIFVPTLSSRSLGRKLHRDILRRWSPPDYFYHFKEGGHVAAARVHLTSGIFVRLDLHRFYDSITRSKVHRALRDIKFRQKDAWHISCQSTVSKNKIGGPFSLPFGFVQSPVLSSLVLSSSALGKTLSILYVSGIKLSVYMDDIIMSGDNSSSLAAAMLALENAARTAGFQFNISKSFGPAPALEAFNLDLSHRTLVVSASRMANFAAAMITGNSITRNGILGYVGTVNIHQRAELASL

SEQ ID NO: 1083 - protein, 301 aa, synthetic construct
  source 1..301: note = MG160-349 reverse transcriptase
MHCLPQSEQEIAQFLGVSPERLRFFYAHMSGHVRRWPKSKKSGGTRTIVEPDAELLDLLRQISRKLLTPIPLHPYIYHRTGSSYLNLINMLRRSSFILTADINNFYPNITPHKVFTSLQRKGYGLQAAKVFTKLTTFKYQLPQGFPTSPILAAIVIEPTLIRLDGMARAYDVLVGIYADDLVIGAKFDFAGHMPLIKKIFKDSGFEIAKFRAMGNEVKREIMGIELHHGKLRVSKSYLDGIQRLSDELGQALTNQDLFEERARVIQGRISFIESVNPHQAHPFIKDINKKLKANWVGKRKT

SEQ ID NO: 1084 - protein, 270 aa, synthetic construct
  source 1..270: note = MG160-350 reverse transcriptase
MPHAFENYLHSYWKNGKPIFVPNDFSSDLGTKLKRKIAKKYTFDKFVYHFKDGSHVVALHRHRNNQFFCRIDLEKFFYSIRRNRVKRVLKSIGIRNPEYYAKWSTVKNPFAGGGYVLPYGFVQSPILATLVLAESPIGTYIRKLPLGIAASVYMDDICLSGPDEDQLAEAFKGLLVAVEEAGFQLNHDKTREPAKQIDIFNCTLEHGTTEVTPARVVKFYDVPRSANGVASFETYCDIVKSHTWRVGAGKRRRRKLYAAKHKAAKAAPAA

SEQ ID NO: 1085 - protein, 260 aa, synthetic construct
  source 1..260: note = MG160-351 reverse transcriptase
MEMWKHKFELKKDRWVYVPTREIANLGKKIHQYLMFEWNTPLHFYHLRDGGHVAAAKLHTGNKFFALIDIQDFFNCTTQSRVTRELKKFIPYAEARKLAKLSTVIIPNIQPVRRAIPYGFPQSPILATLCFNNSHAGGVISNIIKSGQVRISVYMDDIIISGNDVAVLNQEFEKVLTALVKSKYEINEKKKKLPSLEIKVFNMLLSHNSLRVAPERMIAFVQAYAKSESDDERGGIARYVYSVNEQQARRHFPKHMPDYE

SEQ ID NO: 1086 - protein, 244 aa, synthetic construct
  source 1..244: note = MG160-352 reverse transcriptase
MAVAIHNYSFKYDRRGKPVFAPSKVGRRIGQEIKDAVEASFAFSPIYFHFRPGGHVAAIHHHRPRRFFARVDIARFFYSISRRRVQSALDRLGVGNAAFYAKWSTVANPFEAPRYALPYGFVQSPILASLVLASSTVGEHLGSLPPEVTVSVYVDDISLSSDDLGALEAAYHATIGVLEADNFQVSADKLRPPAAAIDVFNCDLAHGHAKVRDDRIGQFMADAPSQEAEAAFAAYCASVEVGNG

SEQ ID NO: 1087 - protein, 247 aa, synthetic construct
  source 1..247: note = MG160-353 reverse transcriptase
MPVRFENFEYSYTRQGRPYFSPSPLGRKIGNDIKSQVENAHTFDPFVYHLRGGGHVAAVHSHRAHHLFARVDIRRFFYGISRSRVQRALQNIGILRARHYAKWSCVKNPYSEPPYSLPYGFVQSPVLATLVLMQSEVGNILRIFDADPVITVSVYMDDITLSSDDRAKLQVAYLDLLTSLATANFDVSPRKLRPPASEVDVFNCDLKHGSTEVRPDRVAEFLGSNPNHASMVGFARYQMSVEAGNTP

SEQ ID NO: 1088 - protein, 253 aa, synthetic construct
  source 1..253: note = MG160-354 reverse transcriptase
MDMWKHKFEIKKNRWVHVPSKEMALFGKKLHKVIRIKWSSPDYYFHLRNGGHVSSAEMHKVNEYFSLVDISNFFESTSQSRVTRELKTLFPYEKARKIAKISTVRVPGRSVKKFSVPYGFPQSPILASLCLHNSFAGRVLDSICKSDNVLVSVYMDDIIFSSKDLTAINNAFDSFCTALEKSRYQINKDKTQVPSKKIAVFNLELSHDHLKVSSARMVQFVIAYAKSTNEYEREGIASYVRSVNPVQANRHFP

SEQ ID NO: 1089 - protein, 246 aa, synthetic construct
  source 1..246: note = MG160-355 reverse transcriptase
MPVQFQNFDYQYTKAGKPYFCPSPLGRKIGDDIKTQVEAAYEFEDFVYHLRNGGHVAALHSHRHHAFFARVDIRRFFYSIARSRVQRALTSAGIIRARHYAKWSCVKNPYGNPTYSLPYGFVQSPILATLVLMESGVGGFLRQAHLDPDITVSLYMDDIALSSDDPGKLDAAFRELLAKLLEAHFEVSDNKVREPSPAMDLFNCDLRTGHTEVRQDRVDEFLSVARSQPSLEGFARYQLSVEEGNV

SEQ ID NO: 1090 - protein, 244 aa, synthetic construct
  source 1..244: note = MG160-356 reverse transcriptase
MAVKFENFSHRFDRKGKPVFAPSELGRRIGSDVKARVESAYKFEPRYTHLMPGGHVSAIHGHRQNAYFCKIDLERFFYSIGRNRVIRALREIGVERPEFYGKWSCVKNPYEDPSYSLPYGFIQSPCLATLVMSLSVLGEFMRTLPEEVLATVYVDDICLSSRDPKMLSEAFEALLVAVDQAGFLVNRSKVVAPTTTIEVFHCSLEMRRSVVTEARIAEFWSVSRTAASSDAFARYVEGVASGNN

SEQ ID NO: 1091 - protein, 270 aa, synthetic construct
  source 1..270: note = MG160-357 reverse transcriptase
MPHAFENYLHSYWKNGKPIFAPNDFSSDLGTKLKRKIAKKYTFDKFVYHFKDGSHVVALHRHRNNQFFCRIDLEKFFYSIRRNRVKRVLKSIGIRKPEYYAKWSTVKNPFAGGGYVLPYGFVQSPILATLVLAESPIGTYIRKLPLGIAASVYMDDICLSSPDEDQLAEAFKGLLVAVEEAGFQLNHDKTREPAKQIDIFNCTLEHGTTEVTPARVVKFYDVPRSANGVASFETYCDIVKSHTWRVGAGKRRRRKLYAAKRKAAKAAPAA

SEQ ID NO: 1092 - protein, 260 aa, synthetic construct
  source 1..260: note = MG160-358 reverse transcriptase
MEMWKHKFELKKDRWVYVPTREIANLGKKIHQYLMFKWNTPLHFYHLRDGGHVAAAKLHTGNKFFALIDIQDFFNCTTQSRVTRELKKFIPYAEARKLAKLSTVIIPNIQPVRRAIPYGFPQSPILATLCFNNSHAGGVISSIIKSGQVRISVYMDDIIISGNDVAVLNQEFEKVLTALVKSKYEINEKKKKLPSLEIKVFNMLLSHNSLRVAPERMIAFVQAYAKSESDDERGGIARYVYSVNEQQARRHFPKHMPDYE

SEQ ID NO: 1093 - protein, 254 aa, synthetic construct
  source 1..254: note = MG160-359 reverse transcriptase
MLHPKWSTKFELKPGKWVFVPTSESIEEGRKIKKAIEDYWEPPRYYYHLRSGGHVEAIKSHLKHNSFLHFDIQDFFGSINRSRVTRTLIGKFSYENARAMAHASTVRHPDEKSRLILPYGFIQSQIVAALCLNISRLGKYLNKLSKNSDVSLSVYVDDIIVSCNDSELSASILVNITNAAENANFILNAAKQEGPAAAITAFNIMLQNNSMMVEALRLKKFVDVLKETESEYQREGILSYVKSINVAQGFALKI

SEQ ID NO: 1094 - protein, 255 aa, synthetic construct
  source 1..255: note = MG160-360 reverse transcriptase
MKVEIWKHKFEIKKGRWVHVPSKEMYLAGRKIHNFILKRWRPYFYYYHMRNGGHVLASKIHLENNYFALIDISNFFECTSQSRVTRELKTLLPYNKAREIAKLSTVRVPKSDPKKFSVPYGFPQSPILATLCLNNSYAGNLIETLRCEYNLTVSVYMDDIIISCNDYDLLCYCYERINFSLIKSNYSLNLAKSQQPSREIEVFNLRLSHNDLAVTSKRMVYFIKSYSESENDFEREGIAAYVRSVNSTQANKHFL

SEQ ID NO: 1095 - protein, 245 aa, synthetic construct
  source 1..245: note = MG160-361 reverse transcriptase
MPVAIHNFDYSYQRKGKPVFVPSARGRRTGMRVKEAVETNFTFDALYFHMGAGGHVAALHHHRGSAFFARIDIARFFYSISRRRVQSALSRIGVPQARIYAKWSTVRNPYGDPIYSLPYGFVQSPILASLVIATSAVGAALEAISPDVKVSVYMDDIAVSGDDLSAVQRVYDDLIDLLQADGFDLSRDKLRPPSPAMDIFNCDLTHGRASVQDERINAFLAGSPSQKSEDAFVAYCATVEAGNVS

SEQ ID NO: 1096 - protein, 260 aa, synthetic construct
  source 1..260: note = MG160-362 reverse transcriptase
MEMWKHKFELKKDRWVYVPTREIANHGKKIHQYLMFKWNTPLHFYHLRDGGHVAAAKLHTGNKFFALIDIQDFFNCTTQSRVTRELKKFIPYAEARKLAKLSTVIIPNIQPVRRAIPYGFPQSPILATLCFNNSHAGGVISSIIKSGQVRISVYMDDIIISGNDVAVLNQEFEKVLTALVKSKYEINEKKKKLPSLEIKVFNMLLSHNSLRVAPERMIAFVQAYAKSESDDERGGIARYVYSVNEQQARRHFPKHMPDYE

SEQ ID NO: 1097 - protein, 253 aa, synthetic construct
  source 1..253: note = MG160-363 reverse transcriptase
MEMWKHKFEVKKNRWVHVPTKEMSLFGKKLNKIIHSKWKAPIYYYHLRNGGHVASARVHIENEYFSLIDISNFFESTSQSRVTRELKKIIPYEKARRIAKLSTVRVPNLKEKKFSIPYGFPQSPILASLCLRNSYAGSVLDSIVKAGIVEVSVYMDDIIFSSKDWVAINEAFDFFGSALERSKYKLNDEKTQRPSKHLVAFNLELSYGNIKVTPKRLVQFIQAYAQSENEYEREGIAAYVHSVNPCQAKLHFP

SEQ ID NO: 1098 - protein, 253 aa, synthetic construct
  source 1..253: note = MG160-364 reverse transcriptase
MEIWKHKFEIKKGRWVHVPSKEMYLAGRKIHNFILKKWRPYFYYYHMRNGGHVLASKIHLENNYFALIDISNFFECTSQSRVTRELKTLLPYNKAREIAKLSTVRVPKSDPKKFSVPYGFPQSPILATLCLNNSYAGNLIETLRCEYNLTISIYMDDIIISCNDYDLLCYCYERISLSLIKSKYSLNLAKSQQPSREIEVFNLRLSHNDFAVTSKRMVDFIKSYSESENDFEREGIAAYVRSVNSIQANKHFL

SEQ ID NO: 1099 - protein, 260 aa, synthetic construct
  source 1..260: note = MG160-365 reverse transcriptase
MEMWKHKFELKKDRWVYVPTREIANLGKKIHQYLMFKWNTPLHFYHLRDGGHVAAAKLHTGNKFFALIDIQDFFNCTTQSRVTRELKKFIPYAEARKLAKLSTVIIPNIQPVRRAIPYGFPQSPILATLCFNNSHAGGVISSIIKSGQVRISVYMDDIIISGNDVAVLNQEFEKALTALVKSKYEINEKKKKLPSLEIKVFNMLLSHNSLRVAPERMIAFVQAYAKSESDDERGGIARYVYSVNEQQARRHFPKHMPDYE

SEQ ID NO: 1100 - protein, 243 aa, synthetic construct
  source 1..243: note = MG160-367 reverse transcriptase
MIENYEFKYLSRGKWIYKPKKSCDRRGQQVIDFIERCVDFPDYFYHFRSGGHVAALHEHLKNTFFFKIDIQNFFYSIARNRVHRALAKCGMRGAPTFAVWPTVRSPYPRGPKFVLPIGFKQSPHIASLVLMNSPVATAIADQQAKGVLISVYLDDIIGSAHDKILLTAAYDAINTACETANLTPNPAKLIEPKAKIVAFNCDLANGAAEVTDDRIAKFYAKYPSVRSKESFEAYVARVASQNV

SEQ ID NO: 1101 - protein, 208 aa, synthetic construct
  source 1..208: note = MG160-368 reverse transcriptase
MLAPQAYTVDSLARVLLLSTDECRDLSQAAHRLYRVMVRLKPSGAQRLIEAPFPRLKKIQGALNEEIFNKIEIHPCFHGKPGTSQLSAARTHVRQPMVVTMDVRNFFPSITSQKVAASLIAQGFTPGVAEVLTKLCTRKRRLPQGAPTSPALARIVTSPILTETENIFRNVSPFCRITQFVDDLAVSGPNGIQRLIPTLHRLWRRHGL

SEQ ID NO: 1102 - protein, 241 aa, synthetic construct
  source 1..241: note = MG160-369 reverse transcriptase
MPLNFKFTYLRKGKHVFVPNDESIARGETLLRHCRQNVQFPDYFFHYRSGGHVAALHEHLQNNFFFRIDIEHFFYSVSRNRVAGALHSTGFHHARTYAQWSCVKNPLAGPRYALPIGFVQSPILASLCIMRSPLAAAIESARQSGVLISIYFDDFIGSAYEREPLEAAYQALLKACGDAAFGANAAKLLSPRDEIEAFNCRLSHGIAEVTPARIQEFLKKGASADSAAAFDAYCNRVAARN

SEQ ID NO: 1103 - protein, 254 aa, synthetic construct
  source 1..254: note = MG160-370 reverse transcriptase
MRENYLYHYKRRDKHVFVPTPECDRRGDELLEFGATLSLPDYFFHYQKGGHVKALHHHINNTHFFRIDLKNFFYSIARNRVNRLLRAYGFSKNARTYAEWSTVRNPYSGGSRYALPIGFRQSPLLASLALYRSSVASAIEDALRRRVLVSVYFDDLVGSSCDVKELQTTYDGILEACVQANLAANADKLLPPAQAIVAFNCNVRFGHASVTGERIDRFDATNPSSEAISAFLAYCGRVERFNHAPGSSIDVLST

SEQ ID NO: 1104 - protein, 276 aa, synthetic construct
  source 1..276: note = MG160-371 reverse transcriptase
MTNIQIISDLISSYPVSGKTWVHHETKPHGGYRKIISPNRQLNSWLKKANTQLYKLCLPWPDIMHGGIKKRSYVTFAQPHVGKQHVITVDIRKCFDNIRDYKVAEVLAAELQISEDVAAILAKLLCYKRVLPQGYATSNLICNLVLRERMNKINLDLSSMGYTVTNYVDDIAISGNIENPHEVINSVATELSRCGLAINKLKVKVYPANKPQTICGLTVNKKLAISRGKRLQLCRAVATGSISDESLQGWLANLHSVNPEFESKLRAYAQKSGYIL

SEQ ID NO: 1105 - protein, 243 aa, synthetic construct
  source 1..243: note = MG160-372 reverse transcriptase
MIENYEFKYLSRGKWIYKPKKSCDRRGQQVIDFIERCVDFPDYFYHFRSGGHVAALHEHLKNTFFFKIDIQNFFYSIARNRVHRALAKCGMRGAPTFAVWSTVRSPYPRGPKFVLPIGFKQSPHIASLVLMNSPVATAIADQQAKGVLISVYLDDIIGSAHDKILLTAAYDAINTACETANLTPNPAKLIEPKAKIVAFNCDLANGAAEVTDDRIAKFYAKYPSIRSKESFEAYVARVASQNV

SEQ ID NO: 1106 - protein, 275 aa, synthetic construct
  source 1..275: note = MG160-373 reverse transcriptase
MTPPTALQMSPEVLAGIVSMPLDRLTKISRAAHRLYIVSNLPKKDGGTRLIEAPYKSLGEIQHSLHKKVLSQVAVHEVLHGRPNTSQLTAAQVHVRQPMVVTMDVRNFFPSVTTTMILGALKKAGFPKQTSEIITRLCTRKRRLPQGAPTSPVLSRIVVTPILHEIEKLVSSVSPHCRITQFVDDLAISGPLGIHRLIPIVHKIWERHGFTIHPQKTKVMGRSKAQEVLGVWVNNRLEPTKDFLDRLADAKEKLPPNDLHRLGLESYHRSIINSG

SEQ ID NO: 1107 - protein, 248 aa, synthetic construct
  source 1..248: note = MG160-374 reverse transcriptase
MTVQFQNYDYSYNRDGKPVFAPSGLGARIGQDIKGQVEAVYVFDDFVYHLKKNGGHVAALHTHRLHQFFARVDIKNFFYGIAKSRVQRSLADLGIQRARHYAKWSCVKNPFDGPRYALPYGFIQSPILATLVLMKSAVGSFLRGVAATGHIAVSVYMDDISLSSDDEAALYGAFEQLKAKLQEANFEISAGKMREPSTAMDVFNCDLSHGKTEVRSDRIGEFYAEMRSPASVDGFEEYCARVQEGNSP

SEQ ID NO: 1108 - protein, 222 aa, synthetic construct
  source 1..222: note = MG160-375 reverse transcriptase
MRHFSRFKFPAHYFHFQSGGHVSALHTHIGQRYFFKIDIQNYYYSIARMRVTRALRSFAYPGANTLAQWSCVSNPYSDGHRHVLPIGFVQSALLASLVLMKSPVANAMKRAIARGVVITIYMDDFIGSHNDPAVLQEAYEDIRTASVAAGLLPNPEKLVPPTQAIVAFNCDMTFGKVVVQTQRIEKYCAKEDRSAASDASFIHYVGRVQASNHAATPIPKLA

SEQ ID NO: 1109 - protein, 248 aa, synthetic construct
  source 1..248: note = MG160-376 reverse transcriptase
MLINYDLKYQTRGRWIFVPTDQCERKGRRIIKFFSRFKFPDYFYHYSPGGHVAAMHAHLKSKLFFKIDIQNFYYSIARMRVTRALRSHGYQGANTLARWSTVRNPYPGDHAHVLPIGFVQSPLLASLVLMKSPAAAAIERAIANGVCISVYMDDFIGSHNDAAALEAAYADIRDACVAAGLVPNPAKLVAPAAAITAFNCDLTFGSANVSAERVAKYQARGDRTADSDASFAQYRDLVAAANIAPAAE

SEQ ID NO: 1110 - protein, 244 aa, synthetic construct
  source 1..244: note = MG160-377 reverse transcriptase
MAVAIPNFEYSYRRKGKPIFVPTAIGRRIGNEVKSEVESAYDFDPIYFHLRRGGHVAAMHHHRDNLSFARIDISKFFYSVSRRRVQSALDRIGVPNARFYAKWSTVENPYDDPKYALPYGFVQSPILASLVLATSQVGEHLLALDPAISVSVYMDDISLSSDNKDKLEEAYTSTLATLERDGFQLSAEKLRPPAAKIDIFNCDLMHGCSTVQDGRVAEFFANQPNPLSEEAFLAYCASVEEGNR

SEQ ID NO: 1111 - protein, 245 aa, synthetic construct
  source 1..245: note = MG160-378 reverse transcriptase
MAVAIPNFEYSYRRKGKPVFVPTAIGRRIGNEVKAKVESAYSFDPIYFHLRPGGHVAAMHHHRDNRSFARIDISRFFYSVSRRRVQSALDRIGVGNARFYAKWSTVLNPYDDPKFSLPYGFVQSPILASLVIATSQVGDHLQRLPATVRASVYMDDISLSSDDHGALLDTYASTLAVLEADGFEVSVEKLRTPAAAIDIFNCDLSHRRSVVREDRIAEFFAGEPNEISEEAFSSYCASVEVGNQL

SEQ ID NO: 1112 - protein, 255 aa, synthetic construct
  source 1..255: note = MG160-379 reverse transcriptase
MKQTINWLHKFEIKKDRWVYIPNAKTLKSGRKIHNLIRFKWKSPLYMFHLRDGGHVAAAKYHIKKKYFSLIDISDFFGATSQSRVTRALGRLVPYVKAREIAKESTVKNLNGNGLKDVIPYGYPQSPILASLCLHQSFCGGVINTLSKSGRVSVSIYMDDILLSSDGLDLLKNAFDAVTEALVKSGYTVNDRKTQSPATMVSVFNLELSQHSLRVSSERIVEFLKAYISSKNPHERKGIASYVGSVNKAQAKIFR

SEQ ID NO: 1113 - protein, 248 aa, synthetic construct
  source 1..248: note = MG160-380 reverse transcriptase
MLINYDLKYQTRGRWIFVPTDQCERKGRRIIKFFSRFKFPDYFYHYSPGGHVAAMHAHLKSKLFFKIDIQNFYYSIARMRVTRALRSHGYQGANTLAMWSTVRNPYPGDHAHVLPIGFVQSPLLASLVLMKSPAAAAIERAIANGVCISVYMDDFIGSHNDAAALEAAYADIRDACVAAGLVPNPAKLVAPAAAITAFNCDLTFGSANVSAERVAKYQARGDRTADSDASFAQYRDLVAAANIAPAAE

SEQ ID NO: 1114 - protein, 246 aa, synthetic construct
  source 1..246: note = MG160-381 reverse transcriptase
MSVSFQNFDYTYRRKGKPVFAPSELGRKIGQDIKQQVERAYSFDDFVFHMQSGGHVGALHFHRDHRYFARVDIENFFYGIARNRVQGALSDLGIRRARHYAKWSCVKNPYGHPTYALPYGFVQSPILASLVLMESGVGEFLREISTGSRVRPSVYMDDISLSADNFDDLTMVFDALQNIMAASGFQISVEKLRKPALAMDIFNCDIRQGHSEVLVERIAAFEASERTQPSKEAFARYCLGVEAGNS

SEQ ID NO: 1115 - protein, 250 aa, synthetic construct
  source 1..250: note = MG160-382 reverse transcriptase
MLPAILNYDQKFFDGKKWIFIPSERGERRAVQVLKFFERSVTFPDYFYHYKSGGHVAALHDHLQHDFFFRIDIQNFFYSIARNRVQRALASKGLKGAPTYAKWSTVRSPYDGGPRYVLPIGFRQSPHIASLVLMQSPVFDAIERARANGVLVSVYLDDIIGSHADQAVLTTAYEDIRQSCVDGNLVPNAQKLVPPSAAITAFNCDLSKGAVNVTPARIAKFFETPHDAHATDAFAAYVTRVARANEAPAG

SEQ ID NO: 1116 - protein, 256 aa, synthetic construct
  source 1..256: note = MG160-383 reverse transcriptase
MESRLPKKWETRFQLKPGTWVFVPTEEARELGYIIKELVEARWRPPKNYFHLTNGGHVHAIGAHVHNTTFAHLDIQDFFGHVNASRVTRWLKPLVGYSKAREFAKASTVAHPSHGGIMLPFGFVQSPILASLCLFHSALGRCLVELPRKLGIVVSVYMDDIILSAADHSVLVHAVKLVDESAVRSGLPIHPDKREGPAPNITAFNIALAHQSLRVKDERWNSFLSDFQASDNEFVRRGIHSYVRSVNLEQANNLGA

SEQ ID NO: 1117 - protein, 250 aa, synthetic construct
  source 1..250: note = MG160-384 reverse transcriptase
MVQKWVSRFEIRPGVYVFVPTEETTEIGKEIKRLVEARWHAPRNYYHLRAGGHVRALRVHTGNTVFARLDIEGFFASISRTRVTRELKGFFGYDRAREFANAATVPTPGKLATVLPFGFVTSPLLASLCLCQSALGRCLRELTPKYGVTVSVYVDDIVLSSNSQRDLEAALADIEVAAARSRFRLSDVKREGPAASITAFNIELTNQSLRIEPRRWTQFINTYSTATSDAVRDGVSGYVRTVNGMQASML

SEQ ID NO: 1118 - protein, 253 aa, synthetic construct
  source 1..253: note = MG160-385 reverse transcriptase
MEMWKHKFEIKKNRWVHVPTKEMALFGKKLHQVIRIKWSSPDYYFHLRNGGHVSSAEMHKENEYFSLIDISNFFESTSQSRVTRELKKLFPYEKARKIAKRSTVRVPGSPLKKFSVPYGFPQSPILASLCLHNSFAGGVLDSICKSDNVLVSVYMDDIIFSSKDLAAINSAFDSFCTALEKSRYKINKDKTQLPSKKIAVFNLELSHDHLKVSSARMVQFVIAYAKSTNEYEREGIASYVRSVNAVQANRHFP

SEQ ID NO: 1119 - protein, 231 aa, synthetic construct
  source 1..231: note = MG160-386 reverse transcriptase
MPTPEAIERGLEIKALIEEKWSAPPFFYHLRHGGHVAALRAHTNNTLFFRADIDDFFGRIGRSRVTRCLKTYVPYAVARDIANLSLVKHPDHGRFILPYGFVQSPVLASLALDKSRLGKLLRRLSSAPQFAVSVYVDDIIVSSKSSVDLQQAAETLIDLASKALLPIGESKREGPSESVEAFNIQLSQDSLEITPERMDLFRSRYLIASSESVRAGIRGYVISVNPVQSDF

SEQ ID NO: 1120 - protein, 257 aa, synthetic construct
  source 1..257: note = MG160-387 reverse transcriptase
MDARWDSKFELKPGKWVFVPNNTAIELGREIKDDLQRRWKAPSYFYHLRDGGHVAALKSHLGQSRFIHVDIRDFFGSINRSRVTRALKGLYSYDEAREIANLSTVRHPEGRERRFILPYGFVQSTLLASVCLRKSALGNFLKRISVEDGVVVSVYVDDIVISLNEPERAEEIFGDLKKSAEKSGFDLNEDKEQRPAERINAFNIELSQNSLQILPERWLRFLDAMRETDNELRQLAILGYVDSVNPGQAAQLQVSAL

SEQ ID NO: 1121 - protein, 262 aa, synthetic construct
  source 1..262: note = MG160-388 reverse transcriptase
MDFVIAMEMWKHKFEVKKDRWVHVPTKEMSLFGKKLNKVIRSKWKAPVNYYHLRDGGHVASARVHIESEYFSLIDISNFFESTSQSRVTRELKKIIPYEKARLIAKLSTVRVPNSKDKKFSIPYGYPQSPVLASLCLNNSYAGRLLDTLSKSGIIKISVYMDDIIFSSKDLDALNEAFDEFSKALERSKYKINNDKTQRPAKKIVVFNLELSHDLLKVAPKRLVQFIQVYAQSQNEYEREGIAAYIHAVNPHQALLHFPKLS

SEQ ID NO: 1122 - protein, 258 aa, synthetic construct
  source 1..258: note = MG160-389 reverse transcriptase
MRNFDHKFPLKAGVMVYVQDAAQQADGYNLIDWIEGRWRAPRHFYHFRNGGHVAAARIHQSAPFILGLDLRRFFDQVTRTKVHRALRRIGYSSADAYEFACESTVTKDGKPGAYSLPFGFVQSMHLASLALHYSELGREMVRTRRAGVKLSNYVDDVLLSADTPDVLIEACDRIFKCAEVAGFGFNPDKERGPADQIEAFNIRIGRGELRVAEGRLNEFRQTVLEPPDDPALATIAYVRTVNPTQADDLSDVRKTAGL

SEQ ID NO: 1123 - protein, 181 aa, synthetic construct
  source 1..181: note = MG160-390 reverse transcriptase
MVLALENFAYQYKKNGKPVFAPNKKGREIGYKAKDLVEAAVTFDPFIYHLSEGTHIRALHDHRKNQYFCRVDIERFFYSISRNRVKRALKEIRIHDAERFARWSTVKNPYPGGGYVLPYGFVQSPILATLVLSSSAVGEYLRSLGEAITASVYMDDVCLSSNSLETLEADFEGLKTAMGEA

SEQ ID NO: 1124 - protein, 247 aa, synthetic construct
  source 1..247: note = MG160-391 reverse transcriptase
MIENYIHKYKSRNKFIYTPSAECKRRADRLLKWGEEIELPSYFFHYRDGGHVSALHEHLKNKYFFRIDLKNFFYSISRNRVARILRQCGFRCAREYSEWSTVKTPYPDGPRYVLPIGFKQSPLLASLALWRSSVASAIEDALDRDVFVSVYFDDLIGSSNDENELRTTYEGILAACVQANLVTNAEKLIPPADAITAFNCHLRHGHADVTDDRIQKFIDEERGAIAEASFIDYCIRVARNNHASEPR

SEQ ID NO: 1125 - protein, 244 aa, synthetic construct
  source 1..244: note = MG160-392 reverse transcriptase
MIINYDFKYRSRGKWFFVPNEKCERRGRRMLAFFKERVAFLDYMYHFKKGGHVAALHAHLNNKLFFKIDIQNFYYSIARMRVTRALRHWGYPGAGTFSMWSCVKNPLPGPPHALPIGFVQSPLLASLVLMKSEVADAIDRAIAKGVCISVYLDDFIGSHDDLAVLTEAYEDIRNTCVTAGLVPNLRKLVAPSAAITAFNCDLKQGSALVTPARVAEYFARTDRTPLSDAGFVQYEGLVSSQNVP

SEQ ID NO: 1126 - protein, 256 aa, synthetic construct
  source 1..256: note = MG160-393 reverse transcriptase
MEMWKHKFEVKKDRWVHVPTKEMSIFGKKLNKILRSKWKSPDYFYHLKNGGHVSSARIHIENEYFSLVDISNFFESTSQSRVTRELKTIIPYEKARLIAKASTVRLANRKEKKFSIPYGYPQSPILASLCLNNSFAGRALDLIIKRGDVLVSVYMDDIIFSSNNLNSITESFDLFCIALEKSKYKINKNKTQRPSKQLAVFNLELSHHHLRVAPERMVQFIQAYAQSENEHECEGIAAYVRSVNSNQALLHFPRKD

SEQ ID NO: 1127 - protein, 256 aa, synthetic construct
  source 1..256: note = MG160-394 reverse transcriptase
MLDNYNHKFTLPKGHQVFVPSWRSRRDGALIQRLVHRRWRTPSYFYHLRSGGHVAAARRHLSSTIFVRLDISRFYDSITRAKIHRALRVLGVDHAAAWNIARESTVEKTSGAGDFSVPYGFVQSPILSSIALDRSALGRAMKGINSGRSGVLISDFVDDVILSGTALSAVEDARSALIDAAYTSGFEFNSKAEGPAPEITVFNLVLSNGTLVVSDAKMAEFEVEVRKGDPAVSTGIITYVWTVNPAQADYLRTKLP

SEQ ID NO: 1128 - protein, 251 aa, synthetic construct
  source 1..251: note = MG160-395 reverse transcriptase
MTQKWTHCYQLKPSRWVFAPTDEARKTGQRIKGAVEAHWRPPHFYFHLRKGGHVAAVRSHMPSKFFFRADIDDFFGRVSRSRITRCLKSWFSYADAREMASESVVKRPGLEGFVLPYGFVQSPILASLALEKSALGAYLRKLSSRGDLRVSVYVDDIIISGDNESVLGEVGERLIDLASKALFPVSREKREGPAEEVTAFNIRVSRAALRITDERMAELRLSYQSATSEFSRAGILGYVDSVSPAQADSLR

SEQ ID NO: 1129 - protein, 256 aa, synthetic construct
  source 1..256: note = MG160-396 reverse transcriptase
MPKTYELRYQRAPGKWVYVPTQASKIRGYQIIGRVTKTYSPHSIFFHLGARGGHVAALRRHLDSRYFSRLDLANFFGNVTRTKTCEALEDIGFGNRQAFDWAVQSSVVEDARKILPQGFPQSPLLATLVLERSALGRALIRLSNTVVVTVYMDDVVLSGTEAAAVLHASDEVLEAAAVSNLPIAQNKVALAQGSVEAFNCDLTHRHMKISNPRLDRFASQWTAGNAAAQEAIGRYLSAINEGDIQRLAALVNVPTG

SEQ ID NO: 1130 - protein, 253 aa, synthetic construct
  source 1..253: note = MG160-397 reverse transcriptase
MAFNYEYRFEIKPDRWVYIQTEDAKKRAESFIKTIRKNYTPNEIFYGMRRHGGHVSALHAHRGNLYYSRFDIDSFFWRITRSRIVRALRSIGIQKDKAFNIAYASVVQDGDRKHLPFGFRQSPLIATLALEKSLLGKKLISIKNSGICVTAYVDDIIISSNSLEDISVATDEVIIASKQAELPLSAEKMSKSMGEITAFNCNLAKLGPRITEERLAEFVDQMNSGSPESIRSILNYISAISADDIERLTKKIH

SEQ ID NO: 1131 - protein, 277 aa, synthetic construct
  source 1..277: note = MG160-398 reverse transcriptase
MGNTERLEKLLIEYPADARVHQTLVPKSNGTSRPIITPNKPLNKWLKLVKRELRQLRKDWPTFIHGGVKKRSYVSFVRPHTNKKTVITIDIHECFSSITQDKVQTALISKLSLDAELAQRLSKKLCYKGHLPQGFATSSYLANLCLNDTLLIIKRKANRLGASVTVYVDDIALSGQRVNPGELINVITTELSRANLLVKKAKIKVMQSHQPQIICGLTVNRGVMLTRQKRKELFASIANGSMSEISLRGWLANLNMLDKKLMQKLEAYAIKKGVISN

SEQ ID NO: 1132 - protein, 287 aa, synthetic construct
  source 1..287: note = MG160-399 reverse transcriptase
MLRSISTARLSTMPLAFENFLYSYKKNGKPIYAPNPFGEKLGAELKRRVNKAYKFDSFVYHFKDGSHVLALHRHRNNQFFCRIDISKFFYSIQRNRVKRALKDIHVQRPEYYAKWSTVKNPYGAGYVLPYGFVQSPILATLVISKSPIGVYLRGLPASVTVSVYMDDICLSGNDEAELQTAFDGLVAAVAEAGFTLNDEKTRPPAAQIDIFNCSLTNGKTEVLQDRVDEFFAVDRSPASEEGFKTYCDIVESKTWRTGHKKKRRTAYFRSLPKPAPVAPAAPEPPTT

SEQ ID NO: 1133 - protein, 287 aa, synthetic construct
  source 1..287: note = MG160-400 reverse transcriptase
MLRSISTARLSTMPLAFENFLYSYKKNGKPIYAPNPFGEKLGAELKRKVNKAYKFDSFVYHFKDGSHVLALHRHRNNQFFCRIDISKFFYSIQRNRVKRALKDIHVQRPEYYAKWSTVKNPYGAGYVLPYGFVQSPILATLVLAKSAIGIYLRGLPATITVSVYMDDICLSGNGEADLQTAFEGLIAAVAEAGFTLNDEKTRPPAPQIDIFNCSLANGKTEVLQDRIDEFFSEEHSAASEEGFKIYCDIVESKTWRTGHKKKRRTAYFRSLPKPAPVAPAASAPSTT

SEQ ID NO: 1134 - protein, 243 aa, synthetic construct
  source 1..243: note = MG160-401 reverse transcriptase
MIVNYEFKYHSRGKWFFVPNDKCERRGRRMLAYFKRRVAFPEYMYHFRKGGHVAALHAHLNNHFFFKIDIQNFYYSIARMRVTRALRQWGYPGANTFAIWSCVRNPLPGPKHALPIGFVQSPLLASLALMKSEVAQAIERAIAKGVCISVYLDDFIGSHDDEAVLTAAYQDIRNTCVAAGFIPNPGKLVPPQAAITAFNCDLTNGSAEVTGARVAKYMSRTDRTALSDAGFNEYRDLVRSQNV

SEQ ID NO: 1135 - protein, 245 aa, synthetic construct
  source 1..245: note = MG160-402 reverse transcriptase
MPVAIPNFDYSYLRKGKPVFVPTKTGRRIGAEIKEAVERAYTFDPIYFHLRRGGHVAAMHHHRESHTFARIDISNFFYSISRRRVQSALDRIGVGNARFYAKWSTVLSPFGNPRYALPYGFVQSPILASLVIATSDLGQHLVGLPASVKSGVYVDDISLSSDDANELQHAYEETLAAIAADGFAVSPGKLRSPAPAIDIFNCDLAHGKANVTDNRINAFLSSNPSQAAEDAFVAYCASVEMGNQA

SEQ ID NO: 1136 - protein, 257 aa, synthetic construct
  source 1..257: note = MG160-403 reverse transcriptase
MHPHERWRSKFKIKECTWVFVPTDETIATGLQVKELIEGYWSAPDHYYHLRKGGHVLALQKHTKHKFFIHLDIQNFFGQINKSRVTRCLKEHIPYESAREIAVESTVRLPESAETKFILPFGFVQSPIIASLCLSKSALGRYLYRLEQRKGLDVSVYMDDILISGDNIEELEQELVKIKAAAEKSGLPLNPLKQEGPDTCVSAFNIRLSQGLLKIIPSKLQELANTYSSSTNEHQRAGILNYVLSINLAQAELFLYI

SEQ ID NO: 1137 - protein, 328 aa, synthetic construct
  source 1..328: note = MG160-404 reverse transcriptase
MVNEKHWVYRTVIFPRVFTEKSLLYLVGTKRREFLELTENKSLFYKIDKEPKKSGGFRDIYKPHWRLKILLRKINSRVLSRLNFPDFVHCGPSGKSIITATRGHNKFKFHISLDIKSFFDQVSKETTSGILRKIGINKEITATIVRAAVEHDRLPQGFPTSPLLATLVVSYVLQDFYSSFVRKEILISVYADDILISSNYKEMLWEAKKYVESELNNVGLSLNTKECFAKNGERFTWLSLQVYPWVTLPRKELLLLEKVIYKYKETGIVPLDFKPKKIPREPYDIRELWEESVKGKVVFAKSVSHTKLADKTLKKLDSVKVSSMRKTA

SEQ ID NO: 1138 - protein, 290 aa, synthetic construct
  source 1..290: note = MG160-405 reverse transcriptase
MSIAPPKSIEELARRLEMDCVKLISISVKAPLLYGRKEIPREGKPPRIIEPPHKNLKELQRKLLDTTLIHLRCDDSLFARKGTNTVDAVIPHISKPILITMDIKNFFPSVSHFQVKTALKSRGIPDDVAKLITRLTTHRHHLPQGAPTSVELGRLVMHPVALEVKRALDATGTNYAFSMYVDDVIISGPVGLKRMIGIIYKIYERHGFNLDKSIKMRTMRLGKDVQEALGIRIDRGIEPGEAIRLKLAHANSNSKEHKGLRSYASHLQNRNKKYSERKKCNVGGRCKLCH

SEQ ID NO: 1139 - protein, 313 aa, synthetic construct
  source 1..313: note = MG160-406 reverse transcriptase
MSWRYCSSKSFPKIFTQKSFLFLIHVKRRNFVKLSEEKSFHYKKTKKLKRDGIKYREIYKPDRELKFILKKINRKYLSKFDFPPFVHCGPRGKSIVTAAQGHTEFSHHVSLDIESFFDRVTKKVTEETLIKIGVNKNIVELISGIAIEDNRIPQGFPTSSSLSALVVSFVLQDFCLHFNKGEIIFSLYADDILISSNNESLLKLAEKFIDKQLWSIGLSLNSKKEVGKKGKKFKWLGLQIHPWISLPRKTMVDLQKRVYEYKTNGIIPEDFKPKKRGQIKKQWEQSVKGKIVFAQSVSENKLLEKILKKISDT

SEQ ID NO: 1140 - protein, 244 aa, synthetic construct
  source 1..244: note = MG160-407 reverse transcriptase
MFQNYKWTWKRNGKIIFAPTKDTDRRGDQIIEFCDREVEFPVCFYHYRKGGHVVALHGHLQNRLFFKIDIQNFFYSISRNRIAAALHHARFPWARTFAKWSSVKNPYPVGSRYVLPIGFKQSPALASLVVMRSPLMAMVDRAERAGAFVSIYLDDLICSANDETLLQELYDGFLQACEDANLTPNPTKLVAPTSEIVVFNCELRHGFAQVTPERIAKYFEEPRTAASQRSFDVYCAKVSEANTV

SEQ ID NO: 1141 - protein, 228 aa, synthetic construct
  source 1..228: note = MG160-408 reverse transcriptase
MHCGPRGKSIVTAAQGHTEFSHHVSLDIESFFDRVTKKVTEETLIKIGVNKNIVELISGIAIEDNRIPQGFPTSSSLSALVVSFVLQDFCLHFNKGEIIFSLYADDILISSNNESLLKLAEKFIDKQLWSIGLSLNSKKEVGKKGKKFKWLGLQIHPWISLPRKTMVDLQKRVYEYKTNGIIPEDFKPKKRGQIKKQWEQSVKGKIVFAQSVSENKLLEKILKKISDT

SEQ ID NO: 1142 - protein, 288 aa, synthetic construct
  source 1..288: note = MG160-409 reverse transcriptase
MLRENPNGRQCLDMKDLRELTESSLSKTLKISADKLRSLSQKAPLLYRERKESKKSGGLRLIEAPHENLKSTQRNLLHGILDHLPLSDSFFGRAGSSAIQAAQLHVNKPMVVTMDIKDFFPSVSSKMVYGMFRRRGASQVVAKILTRLVTRKSHLPQGAPTSSCVAALVLSPAIHDIERAIKSIGVSSFSVYVDDVALSGPVGLKRIKETVVSIFERHGFRVHPAKIRVMPKGMNQEVLGLAVNRGLEVSQSFQAEYEQKVNELGPSHPTVKGKRNYIDSVAKTHKSA

SEQ ID NO: 1143 - protein, 244 aa, synthetic construct
  source 1..244: note = MG160-410 reverse transcriptase
MFQNYKWTWKRNGKIIFAPTKDTDRRGDQIIEFCDRAVEFPACFYHYRKGGHVVALHGHLQNRLFFKIDIQNFFYSISRNRIAAALHHAGFPWARTFAKWSSVKNPYPVGSRYVLPIGFKQSPALASLVMMRSPLMAMVDRAERAGAFVSIYLDDLICSANDEALLQELYDGFLQACEDANLTPNPTKLVAPTSEIVVFNCELRHGFAQVTPERIAKYFEEPRTAASQRSFDLYCAKVSEANTV

SEQ ID NO: 1144 - protein, 412 aa, synthetic construct
  source 1..412: note = MG160-411 reverse transcriptase
MTNSAGNQPRQNRDIQAILRPIVKRLGNCHEGVILKNASRALKNGDSCSTIRFIRMCLKSPNLFQGEILQLKYIVQLLQRRKIISWIDSSLVDMLYWLYLIPPEYKIQVFVMLWKLLQDTLSVYSILSSKYTMNLETYTLNDLADLLSFDSPEELRLLAMRAEKEYGFIKKWKDEDNHEKGYRIINPPSDGLKAIQQKLLNTLLYSIPTPDYMGGGKGSSTKELMKKHMNKAMLICFDISDFFPSVKSQFVYKALRSRGVSKDVAEVLTQLTTYRGHLPQGGPCSTQLAKIVVMTPAKHLQQHLTNCFGQGFEVSFWVDDIVISGPISLGDLIKRKTIYAIFKRYGFVLKKEKTRKASKTEEQTALGIRVDHHRMRPCSTFMERYKKALHDEGVNSLKVQGMQQFIRHVSIR

SEQ ID NO: 1145 - protein, 412 aa, synthetic construct
  source 1..412: note = MG160-412 reverse transcriptase
MTNSAVNQPRQNRDIQAILRPIVKRLGNCQEGVILKNASRALKNGDSCSTIRFIRMCLKSPNLFQGEILQLKYIVQLLQRRKIISWIDSSLVDMLYWLYLIPPEYKIQVFVMLWKLLQDTLSVYSILSSKYTMNLETYTLNDLADLLSFDSPEELRLFAMRAEKEYGFIKKWKDEDNHEKGYRIINPPSDGLKAIQQKMLNTLLYSIPTPDYMGGGKGSSTKELMKKHMNKAMLICFDISDFFPSVKSQFVYKALRSRGISKDVAEVLTQLTTYRGHLPQGGPCSTQLAKIVVMTPAKHLQQHLTNCFGQGFEVSFWVDDIVISGPISLGDLIKRKTIYAIFKRYGFVLKKEKTRKASKTEEQTALGIRVDHHRMRPCSTFMERYKKALHDEGVNSLKVQGMQQFIRHVSIR

SEQ ID NO: 1146 - protein, 412 aa, synthetic construct
  source 1..412: note = MG160-413 reverse transcriptase
MTNSAGNQPRQNRDIQAILRPIVKRLGNCQEGVILKNASRALKNGDSYSTIRFIRMCLKYPNLFQGEIIQLKYIVQLLQRRKTISWIDSSLVDMLYWLYLIPPEYKIQVFVMLWKLLQDTLSVYSILSSKYTMNLETYTLNDLADLLSFDSPEELRLLAMRAEKEYGFIKKWKDEDNHEKGYRIINPPSDGLKAIQQKLLNTLLYSIPTPDYMGGGKGSSTKELMKKHMNKAMLICFDISDFFPSVKSQFVYKALRSRGVSKDVAEVLTQLTTYRGHLPQGGPCSTQLAKIVVMTPAKHLQQHLTNCFGQGFEVSFWVDDIVISGPISLGDLIKRKTIYAIFKRYGFVLKKEKTRKASKTEEQTALGIRVDHHRMRPCGTFMERYKKALHDEGVDSLKVQGMQQFIRHVSIR

SEQ ID NO: 1147 - protein, 412 aa, synthetic construct
  source 1..412: note = MG160-414 reverse transcriptase
MTNSAVNQPRQNRDIQAILRPIVKRLGNCQEGVILKNASRALKNGDSCSTIRFIRMCLKSPNLFQGEILQLKYIVQLLQRRKIISWIDSSLVDMLYWLYLIPPEYKIQVFVMLWKLLQDTLSVYSILSSKYTMNLETYTLNDLADLLSFDSPEELRLLAMRAEKEYGFIKKWKDEDNHEKGYRIINPPSDGLKAIQQKMLNTLLYSIPTPDYMGGGKGSSTKELMKKHMNKAMLICFDISDFFPSVKSQFVYKALRSRGISKDVAEVLTQLTTYRGHLPQGGPCSTQLAKIVVMTPAKHLQQHLTNCFGQGFEVSFWVDDIVISGPISLGDLIKRKTIYAIFKRYGFVLKKEKTRKASKTEEQTALGIRVDHHRMRPCSTFMERYKKALHDEGVNSLKVQGMQQFIRHVSIR

SEQ ID NO: 1148 - protein, 412 aa, synthetic construct
  source 1..412: note = MG160-415 reverse transcriptase
MTNSAVNQPRQNRDIQAILRPIVKRLGNCQEGVILKNASRALKNGDSCSTIRFIRMCLKSPNLFQGEILQLKYIVQLLQRRKIISWIDSSLVDMLYWLYLIPPEYKIQVFVMLWKLLQDTLSVYSILSSKYTMNLETYTLNDLADLLSFDSPEELRLFAMRAEKEYGFIKKWKDEDNHEKGYRIINPPSDGLKAIQQKLLNTLLYSIPTPDYMGGGKGSSTKELMKKHMNKAMLICFDISDFFPSVKSQFVYKALRSRGISKDVAEVLTQLTTYRGHLPQGGPCSTQLAKIVVMTPAKHLQQHLTNCFGQGFEVSFWVDDIVISGPISLGDLIKRKTIYAIFKRYGFVLKKEKTRKASKTEEQTALGIRVDHHRMRPCSTFMERYKKALHDEGVNSLKVQGMQQFIRHVSIR

SEQ ID NO: 1149 - protein, 256 aa, synthetic construct
  source 1..256: note = MG160-416 reverse transcriptase
MPKRLWVDKFEIKPNKWVFVQSLEHKKRGLALVAGLARRWSPPSFYYHFREGGHVAALKSHKRHQYFFYIDIRDFFGSINKTRITRILKKHMKYDAARSVANFSTVKIKSNSEEKYVLPFGFTQSPFLSAMCLDDSQLGRLLREYSVLSSSGSLNVSVYMDDIILSSSNLKYLTDAGQSILTAVNRSGFEIKDIGDADVKELVEVFNVRLSQGLLEITQEKMHDFSMRYAVSSNENEQLGIYNYVKSINPAQAALL

SEQ ID NO: 1150 - protein, 236 aa, synthetic construct
  source 1..236: note = MG160-417 reverse transcriptase
MPTQEGRGRGREIKAAIEEVWTPPSYYYHLRPGGHVAAVREHFASPWVASVDLQRFFDQISRSRVARCLKKIGFGNDVAWEMACDSVVDKRPPQREFSVPFGFIQSPIIASLVLSNSILGRLIDKFRTNGVAITVYVDDISISEANEGALRDIVAQLDDAARLSGFKFNPQKIQKPARTATSFNIEFGSGKMRIVEDRLSQFEISLRMANEPKIEGILAYVAPVSNDDLDRLANFV

SEQ ID NO: 1151 - protein, 242 aa, synthetic construct
  source 1..242: note = MG160-418 reverse transcriptase
MKPGRWVYVPTPLGRARGEEIRKQVSSVWKPPAFYFHLRQGGHVAALQSHVGNRYFFRGDIQDFFGRVNRSRVTRGLKKYFSYAKAREMAGDSVVVSPTSGNTMLPFGFVQSPLLASLVLDESRVGRWLAKSAGRPGLKVSVYVDDILLSSHDKEFLRANVLELEALAGAAGLPLNALKSEGPADLVTAFNIELTNGNLAITPERIEFFREAYSSAVSSKVEDGILGYVASVNPTQVASVTV

SEQ ID NO: 1152 - protein, 253 aa, synthetic construct
  source 1..253: note = MG160-419 reverse transcriptase
MSHINYEYRYEIKPGRFVYVQTRSSAISGRAIIKQVSRKYKPSRIFYHFRRMGGHVAALRLHQGSLFFSRFDIENFFGQVARSRIARSLRQVGIAHRRAFNIAVESVVVEGANKVLPFGFCQSPVLATVALEFSMLGSTLKRLSAAGFRVSVYVDDIIISGNDQAALHAASLELIDAASLSKFPLSTSKRTIAASAVEAFNCQIDSHTITILDDRMDRFVSDHRDCTPWAQGAIEKYVNAISPAELVRLNSLL

SEQ ID NO: 1153 - protein, 259 aa, synthetic construct
  source 1..259: note = MG160-420 reverse transcriptase
MKNYSSKILLGADKFAYEQVPSFKLLDEALSSRIYDARQPPSIFYHHRNGGHIAVLDKHLQSDTFSRFDISQFFNRVTKNKIIKALKTCGFSLIKASEATAHSVLKTEVGFHLPYGFTQSPALASLCLNRSQAGKFLGKLDKDILVSVYVDDIILSHKNDPIKLRKVSESLIETFTSVGFPISETRSVIAQPTITAFNIELHNNSMALTPERLIGFHNQVIAGWQSDDVLVGVYNYVLSVNAAQGAEIEHAISRMQSHR

SEQ ID NO: 1154 - protein, 259 aa, synthetic construct
  source 1..259: note = MG160-421 reverse transcriptase
MKNYSSKIPLGADKFAYEQVPSFKLLDEALSSRIYDARQPPSIFYHHRNGGHIAVLDKHLQSDTFSRFDISQFFNRVTKNKIIKALKTCGFSLIKASEATAHSVVKTEAGFHLPYGFTQSPALASLCLNRSQAGKFLGELDKDILVSVYVDDIILSHKNDPIKLRKVSKSLIETFTSVGFPISETRSVIAQPTITAFNIELHNNSMALTPERLIGFHNQVIAGWQSDDVLVGIYNYVLSVNAAQGAEIEHAISRMQSHR

SEQ ID NO: 1155 - protein, 259 aa, synthetic construct
  source 1..259: note = MG160-422 reverse transcriptase
MKNYSSKILLGADKFAYEQVPSFKLLDEALSSRIYDARQPPSIFYHHRNGGHIAVLDKHLQSDTFSRFDISQFFNRVTKNKIIKALKTCGFSLIKASEATAHSVLKTEVGFHLPYGFTQSPALASLCLNRSQAGKFLGKLDKDILVSVYVDDIILSHKNDPIKLRKVSESLIETFTSVGFPISETRSVIAQPTITAFNIELHNNSMALTPERLIGFHNQVIAGWQSDDVLVGVYNYVLSVNAAQGAEIEHAISRMQSRR

SEQ ID NO: 1156 - protein, 266 aa, synthetic construct
  source 1..266: note = MG160-423 reverse transcriptase
MTELPQTKSALIQLLQVETDTFEEVLSQAPRFYRCRWERKPAGGRRRIEEPGSSLKEIQRCLNHRLFQKLDGLPNVYPQKGTSHKDALKPHESQPVVVTLDIKDFFPSIRRHRLKQLFLRKGFCAEISNHLLRLVTYRGHLPQGAPSSSAIARLYILDLVSDLEKYLKDIPSLRITVFADDIVISGPEGTQRTIPGLMRLAPRYGLKINKRKIKVMRGQEQKALGVCMFPHLHLDKEFSDEAERLRDQGNKRSYQGKMAYKKFIER

SEQ ID NO: 1157 - protein, 254 aa, synthetic construct
  source 1..254: note = MG160-424 reverse transcriptase
MYDMNQRWKHKFEIKPGKWVHVPADGEIEYGTKLNKQLQKRFPFPNLYWHLKCGGHVKALNEHTESKYFASLDLGGFFTSITRNRVTRSLKGRYSYQQARDIATRSTVWTPDQNKYVLPFGFVQSTLLATICLNQSTLGSVLQAISNTPNLAVSVYVDDIIVSGLTIGSVLSAFDRLKLAVTRSNFNINNDKLQEVSESIEAFNIRLTHNELLITDKRMIQFQDAYASATSKYSQEGILTYISSVNPLQSNLMK

SEQ ID NO: 1158 - protein, 259 aa, synthetic construct
  source 1..259: note = MG160-425 reverse transcriptase
MKNYSSKIPLGADKFAYEQVPSFKLLGEALSSRIYDAWQPPSIFYHHRNEGHIAVLDKHLQTDTFSSFDISQFFNRVTKNKIIKALKTCGFSLIKASESTAHSVVKTEAGFHLPYGFTQSPALASLCLNRSQAGKFLGELDKDILVSVYVDDIILSHKNDPIKLRKVSESLIETFTSVGFPISETRSVIAQPTITAFNIELHNNSMALTPERLIGFHNQVIAGWQSDDVLVGIYNYVLSVNAAQGAEIEHAISRMQSHR

SEQ ID NO: 1159 - protein, 276 aa, synthetic construct
  source 1..276: note = MG160-426 reverse transcriptase
MKNYSSKIPLGADKFAYEQVPSFKLLGEALSSRIYDAWQPPSIFYHHRNGGHIAALDKHLQSDTFSRFDISQFFNRVTKNKIIKALKTCGFSFIEASEAAAHSVVKTEAGFHLPYGFTQSPALASLCLNRSQAGKFLGKLDKDILVSVYVDDIILSHKNDPIKLRKVSESLIETFTSVGFPISETRSVIAQPTITAFNIELHNNSMALTPERLIGFHNQVIAGWQSDDVLVGIYNYVLSVNAAQGAEIEHAISRMQSRRQTTTSTSSCSPTPNTRL

SEQ ID NO: 1160 - protein, 185 aa, synthetic construct
  source 1..185: note = MG160-427 reverse transcriptase
MKNYSSKIPLGADKFAYEQVPSFKLLGEALSSRIYDAWQPPSIFYHHRNGGHIAALDKHLQSDTFSRFDISQFFNRVTKNKIIKALKTCGFSFIEASEAAAHSVVKTEAGFHLPCGFTQSPALASLCLNRSQAGKFLGKLDKDILVSVYVDDIILSHKNDPIKLWKVSKSLIKTFTSVGFQNFRN

SEQ ID NO: 1161 - protein, 185 aa, synthetic construct
  source 1..185: note = MG160-428 reverse transcriptase
MKNYSSKIPLGADKFAYEQVPSFKLLGEALSSRIYDAWQPPSIFYHHRNGGHIAALDKHLQSDTFSRFDISQFFNRVTKNKIIKALKTCGFSFIEASEAAAHSVVKTEAGFHLPYGFTQSPALASLCLNRSQAGKFLGKLDKDILVSVYVDDIILSHKNDPIKLRKVSKSLIETFTSVGFPNFRN

SEQ ID NO: 1162 - protein, 185 aa, synthetic construct
  source 1..185: note = MG160-429 reverse transcriptase
MKNYSSKIPLGADKFAYEQVPSFKLLGEALNSRIYDAWQPPSIFYHHRNEGHIAVLDKHLQTDTFSRFDISQFFNRVTKNKIIKALKTCGFSLIEASKPTAHSVVKTEARFYLPYGFTQSPALASLCLNRSQAGKFLGKLDKDILVSVYVDDIILSHKNDPIKLRKVSKSLIETFTSVGFPNFRN

SEQ ID NO: 1163 - protein, 259 aa, synthetic construct
  source 1..259: note = MG160-430 reverse transcriptase
MKNYSSKIPLGADKFAYEQVPSFKLLGEALSSRIYDAWQPPSIFYHHRNGGHIAVLDKHLQSDTFSRFNISQFFNRVTKNKIIKALKTCGFSFIEASEAAAHSVVKTEAGFHLPCGFTQSPALASLCLNRSQAGKFLGKLDKDILVSVYVDDIILSHKNDPIKLRKVSENLIETFTSVGFPIAETKSVIAQPTITAFNIELHNNSMALTPERLIGFHNQVIAGWQSDDVLVGIHNYVLSVDAAQGAEIEHAISRMQSRR

SEQ ID NO: 1164 - protein, 259 aa, synthetic construct
  source 1..259: note = MG160-431 reverse transcriptase
MKNYSSKIPLGADKFAYEQVPSFKLLGEALSSRIYDAWQPPSIFYHHRNGGHIAVLDKHLQSDTFSRFNISQFFNRVTKNKIIKALKTCGFSFIEASEATAHSVVKTEARFHLPYWFTQSPALASLCLNRSQAGKFLGELDKDILVSVYVDDIILSHKNDPIKLRKVSKSLIETFTSVGFPISETRSVIAQPTITAFNIELHNNSMALTPERLIGFHNQVIAGWQSDDVLVGIYNYVLSVNAAQGAEIEHAISRMQSHR

SEQ ID NO: 1165 - protein, 259 aa, synthetic construct
  source 1..259: note = MG160-432 reverse transcriptase
MKNYSSKIPLGADKFAYEQVPSFKLLGEALSSRIYDAWQPPSIFYHHRNGGHIAALDKHLQSDTFSRFDISQFFNRVTKNKIIKALKTCGFSFIEASEAAAHSVVKTEAGFHLPCGFTQSPALASLCLNRSQAGKFLGKLDKDILVSVYVDDIIFSHKNDPIKLRKVSENLIETFTSVGFPIAETKSVIAQPTITAFNIELHNNSMALTPERLIGFHNQVIAGWQSDDVLVGIHNYVLSVNAAQGAEIEQAISRMQSRR

SEQ ID NO: 1166 - protein, 259 aa, synthetic construct
  source 1..259: note = MG160-433 reverse transcriptase
MKNYSSKIPLGADKFAYEQVPSFKLLGEAFSSRIYVAWQPPSIFYHHRNGGHIAVLDKHLQSDTFSRFDISPFFNRVTKNKIIKALKTCGFSLIEASEPTAHSVVKTEARFHLPYGFTQSPALASLCLNQSQAGKFLGKLDNAILVSVYVDDIILSHKNDPIKLRKVSKSLIETFTSVGSPISETRSVIAQPTITAFNIELHNNSMALTPERLIGFHNQVIAGWQSDDVLVGIHNYVLSVDAAQGAEIEHAISRMQSRR

SEQ ID NO: 1167 - protein, 227 aa, synthetic construct
  source 1..227: note = MG160-434 reverse transcriptase
MEKFILYVRLFREVVLTSVLVIKLIKLIHDFVIPALNYVTRCFENYSSKVPLGADKFAYEQVPSFKLLGEALSSRIYDAWQPPSIFYHHRNGGHIAALDKHLQSDTFSRFDISQFFNRVTKNKIIKALKTCGFSFIEASEAAAHSVVKTEAGFHLPYGFTQSPALASLCLNRSQAGKFLGKLDKDILVSVYVDDIILSHKNDPIKLRKVSKSLIETFTSVGFPNFRN

SEQ ID NO: 1168 - protein, 259 aa, synthetic construct
  source 1..259: note = MG160-435 reverse transcriptase
MKNYSSKVPLGADKFAYEQVPSFKLLGEALSSRIYDAWQPPSIFYHHRNGGHIAALDKHLQSDTFSRFDISQFFNRVTKNKIIKALKTCGFSLIEASEATAHSVVKTEARFHLPYGFTQSPALASLCLNRSQAGKFLGKLDKDILVSVYVDDIILSHKNDPIKLRKVSENLIETFTSVGFPIAETKSVIAQPTITAFNIELHNNSMALTPERLIGFHNQVIADWQSDDVLVSIYNYVLSVNAAQGAEIEHAISRMQSHR

SEQ ID NO: 1169 - protein, 185 aa, synthetic construct
  source 1..185: note = MG160-436 reverse transcriptase
MKNYSSKIPLGADKFAYEQVPSFKLLGEALSSRIYDAWQPPSIFYHHRNEGHIAVLDKNLQTDTFSRFDISQFFNRVTKNKIIKALKTCGFSLIKASESTAHSVVKTEAGFHLPYGFTQSPALASLCLNRSQAGKFLGELDKDILVSVYVDDIILSHKNDPIKLRKVSKSLIETFTSVGFPNFRN

SEQ ID NO: 1170 - protein, 259 aa, synthetic construct
  source 1..259: note = MG160-437 reverse transcriptase
MKNYSSKIPLGADKFAYEQVPSFKLLGEALSSRIYDAWQPPSIFYHHRNGGHIAALDKHLQSDTFSRFDISQFFNRVTKNKIIKALKTCGFSFIEASEATAHSVVKTEARFHLPYWFTQSPALASLCLNQSQAGKFLGKLDNAILVSVYVDDIILSHKNDPIKLRKVSKSLIETFTSVGSPISETRSVIAQPTITAFNIELHNNSMALTPERLIGFHNQVIAGWQSDDVLVGIHNYVLSVNTAQGAEIEHAISRMQSRR

SEQ ID NO: 1171 - protein, 255 aa, synthetic construct
  source 1..255: note = MG160-438 reverse transcriptase
MKNYLSKIPLGNNKFAYEQVPEFKESGLLYKAKIEGRWTAPEHFYHLKDGGHVAALTKHLQNDMFSKIDLSRFFYRVTKNKIIRSLKRTGLPFQECLEIAADSVVKTENCFSLLYGFVQSPLLASIALHFSGLGKFLTELPSEILVSVYVDDIILSSNGNRELLQDKSSALLASASKAGFPTNSEKCELVSSQIETFNVKLSNQNLWLTDDRMVEFHGFLRAAPSDTQIQGVLGYVGQINQDQMADLGKTAAKYK

SEQ ID NO: 1172 - protein, 185 aa, synthetic construct
  source 1..185: note = MG160-439 reverse transcriptase
MKNYSSKIPLGADKFAYEQVPSFKLLGEALSSRIYDAWQPPSIFYHHRNEGHIAVLDKNLQTDTFSRFDISQFFNRVTKNKIIKALKTCGFSFIEASEATAHSVVKTEARFHLPYGFTQSPALASLCLNRSQAGKFLGKLDKDILVSVYVDDIILSHKNDPIKLRKVSKSLIETFTSVGFPNFRN

SEQ ID NO: 1173 - protein, 221 aa, synthetic construct
  source 1..221: note = MG160-440 reverse transcriptase
MSACFAKLCWLQFLSLSWSSWLMTLWFRLLTMWANVLKNYSSKIPLGADKFAYEQVPSFKLLGEALSSRIYDAWQPPSIFYHHRNGGHIAALDKHLQSDTFSRFDISQFFNRVTKNKIIKALKTCWFSLIEASEATAHSVVKTEAGFHLPYGFTQSPALASLCLNRSQAGKFLGKLDKDILVSVYVDDIILSHKNDPIKLRKVSKSLIETFTSVGFPNFRN

SEQ ID NO: 1174 - protein, 259 aa, synthetic construct
  source 1..259: note = MG160-441 reverse transcriptase
MKNYSSKIPLGADKFAYEQVPSFKLLGEALSSRIYDAWQPPSIFYHHRNGGHIAALDKHLQSDTFSRFDISQFFNRVTKNKIIKALKTCGFSFIEASEAAAHSVVKTEAGFHLPCGFTQSPALASLCLNRSQAGKFLGKLDKDILVSVYVDDIIFSHKNDPIKLRKVSENLIETFTSVGFPIAETKSVIAQPTITAFNIELHNNSMALTPERLIGFHNQVIAGWQSDDVLVGIHNYVLSVNAAQGAEIEHAISRMQSRR

SEQ ID NO: 1175 - protein, 185 aa, synthetic construct
  source 1..185: note = MG160-442 reverse transcriptase
MKNYSSKIPLGADKFAYEQVPSFKLLGEALSSRIYDAWQPPSIFYHHRNGGHIAVLDKHLQSDTFSRFDISQFFNRVTKNKIIKALKTCGFSLIKASESTAHSVVKTEARFHLPYGFTQSPALASLCLNRNQAGKFLGKLDKDILVSVYVDDIILSHKNDPIKLWKVSKSLIKTFTSVGFQNFRN

SEQ ID NO: 1176 - protein, 259 aa, synthetic construct
  source 1..259: note = MG160-443 reverse transcriptase
MKNYSSKIPLGADKFAYEQVPSFKLLGEALSSRIYDAWQPPSIFYHHRNGGHIAVLDKHLQSDTFSRFDISQFFNRVTKNKIIKALKTCGFSFIEASEAAAHSVVKTEAGFHLPYGFTQSPALASLCLNRSQAGKFLGKLDKDILVSVYVDDIILSHKNDPIKLRKVSENLIETFTSVGFPIAETKSVIAQPTITAFNIELHNNSMALTPERLIGFHNQVIAGWQSDDVLVGIHNYVLSVDAAQGAEIEHAISRMQSRR

SEQ ID NO: 1177 - protein, 185 aa, synthetic construct
  source 1..185: note = MG160-444 reverse transcriptase
MKNYSSKIPLGADKFAYEQVPSFKLLGEALSSRIYDTWQPPSTFYHHRNEGHIVVLDKHLQTDTFSRFDISQFFNRVTKNKIIKALKTCGFSLIKASESTAHSVVKTEVGFHLPYGFTQSPALASLCLNRSQAGKFLGKLDKDILVSVYVDDIILSHKNDPIKLRKVSKSLIETFMSVGFPNFRN

SEQ ID NO: 1178 - protein, 256 aa, synthetic construct
  source 1..256: note = MG160-445 reverse transcriptase
MNKIPLGDNKFAYKQEPAYKVLGERLCEKVYSKWTPPSIFYHHRNGGHIAALRKHLPNEHFSKFDISRFFYRISRNKIICALKKCGFSFLEAREAAAQSVVNSGEGFNLPYGFTQSPLLASLCLNRSQAGEFLRGLDKDICVSVYVDDIIISNNDNPAELAEVSEKLISKFNDAGFPISQEKSIISLDEVSSFNITLSNNRMEITPDRMAEFQNQVAEGANNDDVLDGIHNYVRSVNPDQAVKILEVIERARTRRT

SEQ ID NO: 1179 - protein, 259 aa, synthetic construct
  source 1..259: note = MG160-446 reverse transcriptase
MKNYSSKIPLGADKFAYEQVPSFKLLGEALSSRIYDAWQPPSIFYHHRNGGHIAALDKHLQSDTFSRFDISQFFNRVTKNKIIKALKTCGFSFIEASEAAAHSVVKTEAGFHLPYGFTQSPALASLCLNRSQAGKFLGKLDKDILVSVYVDDIILSHKNDPIKLRKVSENLIETFTSVGFPIAETKSVIAQPTITAFNIELHNNSMALTPERLIGFHNQVIAGWQSDDVLVGIHNYVLSVNAAQGAEIEQAISRMQSRR

SEQ ID NO: 1180 - protein, 255 aa, synthetic construct
  source 1..255: note = MG160-447 reverse transcriptase
MKNYLSKIPLGNNKFAYEQVPEFKESGLLYKAKIEGRWTAPEHFYHLKDGGHVAALTKHLQNDMFSKIDLSRFFYRVTKNKIIRSLKRTGLPFQECLEIAADSVVKTENGFSLPYGFVQSPLLASIALHFSGLGKFLTELPSEILVSVYVDDIILSSNGNRELLQDKSSALLASASKAGFPTNSEKCELVSSQIETFNVKLSNQNLWLTDDRMVEFHGFLRAAPSDTQIQGVLGYVGQINQDQMADLGKTAAKYK

SEQ ID NO: 1181 - protein, 185 aa, synthetic construct
  source 1..185: note = MG160-448 reverse transcriptase
MKNYSSKIPLGADKFAYEQVPSFKLLGEALSSRIYDAWQPPSIFYHHRNGGHIAVLDKHLQSDTFSRFDISQFFNRVTKNKIIKALKTCGFSFIEASEAAAHSVVKTEAGFHLPYGFTQSPALASLCLNRNQAGKFLGKLDKDILVSVYVDDIILSHKNDPIKLWKVSKSLIKTFTSVGFQNFRN

SEQ ID NO: 1182 - protein, 259 aa, synthetic construct
  source 1..259: note = MG160-449 reverse transcriptase
MKNYSSKIPLGADKFAYEQVPSFKLLGEALSSRIYDAWQPPSIFYHHRNGGHIAALDKHLQSDTFSRFDISQFFNRVTKNKIIKALKTCGFSLIKASESTAHSVVKTEAGFHLPYGFTQSPALASLCLNRSQAGKFLGKLDKDILVSVYVDDIILSHKNDPIKLRKVSENLIETFTSVGFPIAETKSVIAQPTITAFNIELHNNSMALTPERLIGFHNQVIAGWQSDDVLVGIHNYVLSVNAAQGAEIEQAISRMQSRR

SEQ ID NO: 1183 - protein, 259 aa, synthetic construct
  source 1..259: note = MG160-450 reverse transcriptase
MKNYSSKIPLGADKFAYEQVPSFKLLGEALSSRIYDAWQPPSIFYHHRNGGHIAVLDKHLQSDTFSRFDISQFFNRVTKNKIIKALKTCGFSLIKASEATAHSVVKTEVGFHLPYGFTQSPALASLCLNRSQAGKFLGKLDKDILVSVYVDDIILSHKNDPIKLRKVSESLIETFTSVGFPISETRSVIAQPTITAFNIELHNNSMALTPERLIGFHNQVIAGWQSDDVLVGVYNYVLSVNAAQGAEIEHAISRMQSHR

SEQ ID NO: 1184 - protein, 259 aa, synthetic construct
  source 1..259: note = MG160-451 reverse transcriptase
MKNYSSKIPLGADKFAYEQVPSFKLLGEALSSIIYDAWQPPSIFYHHRNGGHIAVLDKHLQSDTFSRFDISQFFNRVTKNKIIKALKTCGFSFIEASEAAAHSVVKTEAGFHLPFGFTQSPALASLCLNRSQAGKFLGKLDKDILVSVYVDDIILSHKNDPIKLRKVSENLIETFTSVGFPIAETKSVIAQPTITAFNIELHNNSMALTPERLIGFHNQVIAGWQSDDVLVGIHNYVLSVNAAQGAEIEQAISRMQSRR

SEQ ID NO: 1185 - protein, 216 aa, synthetic construct
  source 1..216: note = MG160-452 reverse transcriptase
MKRWKRPPFYYHLQSGGHVAALQCHVKHKYFACLDIEDFFGSVSQTRVTRCLVPWFGFEEARNMARESTVRHPSDKNVTMLPHGFTQSPILASLALAKSAVGNKLIALAKEMAVSVYMDDIILSSDSESQVADARAALEHLAPPSRFKFNADKCQGPSTKVTVFNVKLEQGLLSISDERFDLFATALGDSPSEYVREGILSYVRSVNVTQADALGA

SEQ ID NO: 1186 - protein, 270 aa, synthetic construct
  source 1..270: note = MG160-453 reverse transcriptase
MDLSEITIKDIALLLKITEENLAKLSEKAPHMYYTREMRKRNGGIRIIEAPHTSLKKIQKILLDQLFSGLSYDPILFGGKGSSTKKAVRRHTRKALVITLDIKNFFPNVKSHKVKKMFIRRGAKHDVADLLTRLVTYKNHLPQGAPTSPCIARLILNPVAIHIKRVVRSVKARIEPSIWVDDIIISGPKGLKRLKKTLISIFNRYDFQIPEEKFKIMPDNQEQVSLGIRLNDGIGVPSSYLQKYKAECKKLGASSKRCQGMKAHIRNLQN

SEQ ID NO: 1187 - protein, 255 aa, synthetic construct
  source 1..255: note = MG160-454 reverse transcriptase
MKNYLSKIPLGNNKFAYEQVPEFKESGLLYKAKIEGRWTAPEHFYHLKDGGHVAVLTKHLHNDMFSKIDLSRFFYRVTKNKIIRSLKRTGLPFQECLEIAADSVVKTENGFSLPYGFVQSPLLASIALHFSGLGKFLTELPSEILVSVYVDDIILSSNGNRELLQDKSSALLASASKAGFPTNSEKCELVSSQIETFNVKLSNQNLWLTDDRMVEFHGFLRAAPSDAQIQGVLGYVGQINQDQMADLGKTAAKYK

SEQ ID NO: 1188 - protein, 276 aa, synthetic construct
  source 1..276: note = MG160-455 reverse transcriptase
MNQCFSTLTLDQLPHKLGLEPDKLWRISEKAPCSYRVHQEIKKSGGFRNIEAPNGDLKKVQRKLLKHVLNKIRIDPVFYGVKGTCMVDAIRMHCQKPLVISMDVQNFFPSVTREEIRHALLTRGMTKEVVKVITRLTTYQNRLPQGAPTSPILAALALQPKVREILNMLAPYEGMNISVYVDDITISGPEGLKRFINPITKVIKNSPFSVHPGKTKKMYPQDPPVVLGVEIHGPQLTTTPEFDAKLLDARDRFGSNSLIVKGMINFQRSLNFKKSA

SEQ ID NO: 1189 - protein, 273 aa, synthetic construct
  source 1..273: note = MG160-456 reverse transcriptase
MTVLLKDLNVDSLSDILGIPQSVLVDLTDIAPRLYFEKLHPKKNGGFRTLGIPYSVLKKVQKSLLTKIFNNVPTHPKLFGRPGTSIKDAVASHTKKAVVITMDIKNFFPSTKSYKIKNALMRNGVSIEISELLTRLVSHKNHLPQGAPTSPCIGRIVLHPVAEQIEGYLSNISRSDFSIYVDDITLSGPKGIEKVKEHIYKILNRHKYEINKSKTYVMKREADQVSLNIKLNNGIEATEKMLEEIEKLEFVLPMNHPTLLGKKSFVKFLMKNQ

SEQ ID NO: 1190 - protein, 245 aa, synthetic construct
  source 1..245: note = MG160-457 reverse transcriptase
MAVAIPNFEYSYRRKGKPVFVPTGIGRRIGNEIKGEVEGAYDFDPIYFHLRRGGHVAAMHHHRDNLRFARIDISRFFYSVSRRRVQSALDRIGVANARFYAKWSTVANPYDDPKYALPYGFVQSPILASLVIATSQVGDHLLGLPASVSVSVYMDDISLSSDDPGDLANAYGSTLAVLAADGFQVSAEKLRAPSAAIDIFNCDLTHGRASVRDERIAEFFANGPDQISEDAFIAYCASVEIGNHS

SEQ ID NO: 1191 - protein, 253 aa, synthetic construct
  source 1..253: note = MG160-458 reverse transcriptase
MPAKWLHKFERKPGRWIFEPSPEARAEGIEVKELVESRWKAPRYYFHLRQGGHVAALHRHQRNSCFIKVDIADFFGSVSRSRVSRVLKEFFSHPEARRMATASTVQHPEDPARQILPYGFVQSPLLASLVLHKSALGKWLDELRRDRRFVVTVYVDDIIVSGTDAAELGGILTTLKVKAQQSRLPFSDEKEQGPAGSISAFNIELAAGSVLSVLPPKLAEFRDAFQASTSELQRAGIQGYVRSVNPVQADTLP

SEQ ID NO: 1192 - protein, 163 aa, synthetic construct
  source 1..163: note = MG160-459 reverse transcriptase
MFDYTEARRIATASTVKHPTQDNKVILPYGFVQSPILASLALAQSALGSCLERLSKQRRIHVSVYMDDIIVSSNSDKYLTNAQSQLEDAAKKARFAFHSDKTEGPANMVTAFNIELSPNDLSVAPHRLQQFAETYRSSDNGLQKEGIAGYVNSVNPNQAAELL

SEQ ID NO: 1193 - protein, 280 aa, synthetic construct
  source 1..280: note = MG160-460 reverse transcriptase
MGRTETLEKLLAEYPADAGVFCGFEPKPDGTSRPIVKPNKSLNRWLKQVKRALYQQRKNWPTFIHGGVKKRSYVSFARPHTNKKTVIAIDIHNCFGSITQQEVQTALVNKLSLSDGLASRLAAKLCYKRRVPQGFATSSYLTNLYLNDTLLTINRKLRCLQVGMTIYVDDIALSAQSMDSAEVINTVILELSRARLMVKKAKIRVMHSHGPQIICGLIVNKGIALTRQKKKQLFSDIANKRMSEVALRGWLANLNMIDRELMSKLETYAISKGIIVKEGA

SEQ ID NO: 1194 - protein, 163 aa, synthetic construct
  source 1..163: note = MG160-461 reverse transcriptase
MFDYTEARRIATASTVKHPTQDNKVILPYGFVQSPILASLALAQSALGSCLERLSKQRRIHVSVYMDDIIVSSNSDKYLTNAQSQLEDAAKKARFAFHSDKTEGPANMVTAFNIELSPNDLSVAPHRLQQFAETYRSSDNGLQKEGIAGYVKSVNPNQAAELV

SEQ ID NO: 1195 - protein, 224 aa, synthetic construct
  source 1..224: note = MG160-462 reverse transcriptase
MGAKIKTQVEGVWTAPDYFFHLRAGGHVRALQVHMGQASFLHLDIQDFFGCVNRSRVTRCLSPHFGYTNARQMANDSTVQHPVDLGKYMLPYGFVQSPLLASLAFAHSKLGSCLSKLKEEGYCVSVYVDDIIISAGSDSALNECWPDIQSAAESAKFPLNPTKMQGPGPMVTAFNIELSHGSLRLRSGRLNEFQSAYQTTSNPHARNGIFGYVQAVNPAQAATL

SEQ ID NO: 1196 - protein, 269 aa, synthetic construct
  source 1..269: note = MG160-463 reverse transcriptase
MPLNYEYSFEIRPGKPVFIQRKDALDQGKRLTTAIEEEYQPSDLFFHFRKRGGHVAAMKKHLGNAYFSRFDLNDFFGHVTRTKIVRALRNLGWSHKDAFFDAVDSVVVLNGQRVLPFGFHQSPLIATLVLEQSLLGQFLQRQAHRGFTVSIYMDDILISGNDQASLADTSAELVEVAASAGFPVSAQKQAVALEEATIFNCVLNQDSVRFLDRRMRKFLVDHDATSDLGKQAIEGYIRAVSHDEHESFLRQLDQPDDSAGFGVNVRRFP

SEQ ID NO: 1197 - protein, 257 aa, synthetic construct
  source 1..257: note = MG160-464 reverse transcriptase
MHSYPRWRHKYELKTDVWVFEPTEETILIGNKIKNAVQNAWVIPNNYYHFNLGGHVAALNLHKSDKIFVHLDIKKFFNSINKSRITRSLKTLFDYSTSRKYALQSTVKHPKKLPTTYILPYGFVQSPILASLCLRQSALGIKINNISKFRLVRISVYMDDIIISGNDENLLLNVVSELKLAAAKSNFKLHKEEGPSLNITAFNINLSFNSTFITHDRYKELWCDYNKTTNNNVKHGIATYVSTVNSNQLDGLERPLA

SEQ ID NO: 1198 - protein, 262 aa, synthetic construct
  source 1..262: note = MG160-465 reverse transcriptase
MITNYINRIPFGDGKWLFEQDPVFADAAKKQVMRIKKKWRPPEHFYHLAKGGHVSAISHQLDYSWFCKVDLKRFFQQITRNRVTRHLRSIGYPKLDAIDFAKDSTVLYGDIGPRHFALPYGFTQSPILASLVLDGTPLGKEMYDLVAQDFEVGVYVDDILIAHKDKGQIELAWERAIEAATRSNLVVNEKKSSPPATSCEAFNINYEAGLMQITADRMAEFSEEVLMCGKGATATAILEYVRSVNEDQARELKASFPGIYGP

SEQ ID NO: 1199 - protein, 226 aa, synthetic construct
  source 1..226: note = MG160-466 reverse transcriptase
MGAKIKTQVEEVWTAPDYFFHLRAGGHVRALQVHMGHTSFLHLDIQDFFGCVNRSRVTRCLAPHFGYTNARQMANDSTVRHPVDLGKFMLPYGFVQSPLLASLAFAQSKLGSCLSKLRGQGYCVSVYVDDIIISAGSDSALHECWPEIQGAAESAKFPLNPTKKQGPGPMVTAFNIELSHGSLRLKSGRLDEFQSAYQATSNPHERGGIFGYVQAVNTAQAATLWI

SEQ ID NO: 1200 - protein, 223 aa, synthetic construct
  source 1..223: note = MG160-467 reverse transcriptase
MAVEACWTSPTFYYHLRSGGHVEAVKSHLNHTCFLHVDIEDFFGSINRSRVTRSLKNKVGYKVAREMAHASTVKHPGDGTRCVIPYGFVQSQIIASLCLDESRLGTYLKKLSNMEGVSVSVYVDDIIVSCDSSAVSECILKGLNDAAAKANFKLNPVKQEGPATAITAFNIVLKNKSLEISAPRFEQFISTLEQTTSQFQRDGITSYVKSVNVVQGASLLASP

SEQ ID NO: 1201 - protein, 278 aa, synthetic construct
  source 1..278: note = MG160-468 reverse transcriptase
MGKTETLEKLLTEYPADARIFCSLEPKPDGTSRPIVKPNKSLNKWLKRVKQVLYQQRRDWPGFIHGGVKKRSYVSFAHPHTNKKTVITMDLRNCFGTITQREVQAALVKKLDLPEGLASRLVARLCYKRRLPQGFATSNYLTNLYLNDTLLRINRQMKRRQIDMTIYVDDIALSAQRLNSAEIINLVSLELSRAKLAINKAKVKVMHAHKAQVICGLNVNKGIAIDREKRKELFSDIANGRISEASLRGWLANLHMVDPSLMRKLESYALQKGLIKKG

SEQ ID NO: 1202 - protein, 245 aa, synthetic construct
  source 1..245: note = MG160-469 reverse transcriptase
MPVSFQNYDFSFQLKGRAVFVPSSDGREIGQRIKSLIETKWPFDDTFFHFLPGGHVRALHIHREQRYFARIDLQNFFYSIGRNRVKRTLKEIGIKKAEHFSKWSTVKNPYMPPSYSLPYGFIQSPILASLALLKSEVGISLRHLPDVILRTIYMDDILLSSNDLAELTAAYVAVQESIGASGFQINIAKAIPPSESILAFNCRLELGLTEVTGDRIAEFHGVARSPASVASFDNYCASVATGNRA

SEQ ID NO: 1203 - protein, 279 aa, synthetic construct
  source 1..279: note = MG160-470 reverse transcriptase
MELSSLTVEELARNLGLSTDALKSLADMAPRLYRPRDIPKKSGGTRRIDAPHRNLKAAQTLLLHRVLTHLHTHPILYGGKGTSPEMAVAAHVRKPLVMTLDLKDFFPSVSRRMVLEMLMSRGASRVVATLVCRLVTFKNHLPQGAPTSPQIARLVLHPAAGHIVTALKRTTEQSNGSIWVDDVTVSGPLGLKRLMPTLIRIFERHGFRVNRKKCEMMGADREQVSLGMKLNNGIAPTSAYLAEYERECTRLGSTHQRCVGMRRRIKKLVCGGLATTPIP

SEQ ID NO: 1204 - protein, 257 aa, synthetic construct
  source 1..257: note = MG160-471 reverse transcriptase
MEIEVQRWDHKFEIRPGVWVYVPSAEASELGERIIQAIRNKWIPPLYFYHLRTGGHLKAARLHLKSDFLAVVDIKNFFQSTSRSRVTRDLKAYFTYSQSREISKFSTVRNLSHSPHKHVLPFGFVQSPMLATLCLDRSYLGSLLRRLNKHPNVKLSVYMDDVIISSNDLVQLQTAYDEILVAMDKSGYQPNLVKTQEPSVLINVFNLSLGRGTMKVSPQKMSDFIIDFYASDYEPHKIGVKNYVETVNPAQAKLLKL

SEQ ID NO: 1205 - protein, 207 aa, synthetic construct
  source 1..207: note = MG160-472 reverse transcriptase
MVVRFLNFDYSYERKGKPVYAPSELGSKIGQDIKKQVEAAYDFDDFVYHLRRNGGHVAALHAHRDHQSFARVDIANFFYGIAKSRVQRALSAIGIVRARHYAKWSCVKNPYADDPAYVLPYGFVQSPILATLVLMQSGVGSYLRDIHAAGQVTVSVYMDDLSSPRTTPMRSQKLSTACEPAWKTRISISVPARPASRMPAWMCSTAC

SEQ ID NO: 1206 - protein, 253 aa, synthetic construct
  source 1..253: note = MG160-473 reverse transcriptase
MEAWKHKFEIKKDRWVHVPSKDMVIFGKKLHKFIRRKWNPPFYYYHLRNGGHVIAAKNHKHNDFFSAIDISNFFESTSQSRVTRELKTILPYNQAREVAKISTVRVPGSKDKKFSIPYGYPQSPILASFCLRNSYVGNVLDSINKGGLILVSVYMDDIVLSSKDLNVLNDAFNLICNALKKSHYQINIDKTQPPSEKIRVFNLELSHDQIKVCSDRLIQFIQAYAKTQNEFERKGIAAYIRSVNPQQANLHFP

SEQ ID NO: 1207 - protein, 237 aa, synthetic construct
  source 1..237: note = MG160-474 reverse transcriptase
MFVPTDDFIEYGTEVKEKIAKKWQSPNFYYHLRNGGHVSALKKHIKHQHFIHLDIQNFFGQINRSRTTRCLKEYFSYTEARNIAIKSTVRLPHSTIKKYILPFGFVQSAIIASLCLHKSTLGQHLHQLSHQNDLAVSVYMDDIIISSNSHQQLVEALEPVEVAANKAGFPLNKDKQEGPCEKISAFNIFLAHNELAVTSDRLSDFLSVFEESSNEYQKNGILNYVSCINTKQVALFE

SEQ ID NO: 1208 - protein, 206 aa, synthetic construct
  source 1..206: note = MG160-475 reverse transcriptase
MAALFDHAMNTHFCVMDIKTYFTSTTRSMVVKALKQVGYRYPQAMRDASESSVRHPDTMGQRVLPYGFIQSALLATLCLEYSHVGRVLRELDKSPLTLSVYMDDIIVSGDAEMERDVEDAFTQLGNAFDRSPYSINRVKTQPPSREICVFNALMSHHSIQVHHDRMEKFKEALFANENPHSISAILRYVGVLNPSQEKELEAYLNS

SEQ ID NO: 1209 - protein, 246 aa, synthetic construct
  source 1..246: note = MG160-476 reverse transcriptase
MLVNYDFTYQRKGKHIFVPNDDCVGRGKSLIKFCSRAVEFPSYFFHYEAGGHVAALHGHLRNHFFFRIDLENFFYSISRNRVAAALHASGFWQARSYAQWSCVKNPVRGPTYALPIGFVQSPVLASLVILHSPLAAAIEQARSQGVFISVYFDDFIGSSADQDNLTVAYEAIRRACAEANFVSNPLKLAEPAERIVAFNCDLSHGIAVVTRDRIAKFFETPRTDAATRAFEAYRERVASENRAIDA

SEQ ID NO: 1210 - protein, 247 aa, synthetic construct
  source 1..247: note = MG160-477 reverse transcriptase
MLENYKHKYTSRGKFIFVPTPECDRRADRLLRFAEDIELPPYFFHYRRGGHVEALHQHLERRYFFRIDLKNFFYSISRNRVNRILRQSGFRSAREWSEWSTVRNPYNVGPRYVLPIGFKQSPLLASLALWRSAVASSIEEAGERGVFVSVYFDDLIGSSNDENELRVTYAGLLAACEQANLVANEAKLIEPANAIVAFNCHLTHGRANVTDERIQRFIDEVRGPNAETSFIDYCIRVQRFNRAMEVN

SEQ ID NO: 1211 - protein, 246 aa, synthetic construct
  source 1..246: note = MG160-478 reverse transcriptase
MYINYELTFKHKGKHIFVQNRNGKRRGRQIVDYCSSEVTFPPHFYHYQPGGHVASLHRHMKNRYFFRIDIENFYYSIARNRVAEALHSIGFREARDYAKWSCVKNPFREPAYALPIGFIQSPVLASLVIMRSAVAKAVEDANSAGVFVSVYFDDFIGSSSDLDSLSGAYESILAACTVANFVPNEGKRVAPSERLVAFNCDLEHNRVAVTKERVAAFYQGQPSETSSAAFERYCDRVAGIDIASTA

SEQ ID NO: 1212 - protein, 254 aa, synthetic construct
  source 1..254: note = MG160-479 reverse transcriptase
METWKHKFLLKKNKWVHIPSDEMLKYGSALHIFLRKNWKFPLYYYHLRNGGHVTAAKLHKNNDFFCLIDIKGFFESTTQSRVTRELKKVVPYQEARKIAKLSTVRLPNAVTHKFAVPYGYPQSPVLATLCLQNSYAGSVIDSFYRSGIVTVSVYMDDIILSSKDLAILSQHFELLCGALRKSRYEINLSKTQSPTTKISVFNLELGHRHLKVESARMILFIQAFAKTRNKHEKKSIAKYVHTVNPDQAERHFPK

SEQ ID NO: 1213 - protein, 211 aa, synthetic construct
  source 1..211: note = MG160-480 reverse transcriptase
MAAIQSHIDDRYFLNVDIKNFFGVINRSRITRSLKKRFPYAQAREITVQSTVRVVGESRYEYHLPYGYPQSTILASICLVDSALGRYLNSLSNQCNVSVYVDDIIISGNDPDELQQISDTLAEKSEVSRLFFGRQKAHQVSETITAFNIELSQHKTKITHQRYSQLLQQALLADNESVINGVLGYVRSVNREQHIEMHKELFTLGHIKAPA

SEQ ID NO: 1214 - protein, 239 aa, synthetic construct
  source 1..239: note = MG160-481 reverse transcriptase
MPDDKTKIRGKEIKKVIASKWKPPHYYAHLRQGGHVTALKKHLGNTLFIRTDIEQFFNSIGRTRVTRHIHSLFKDYNLARDMANESTVVRPNHTPKAYILPYGFVQSAIIASLCLHKSALGRYLNKLEGSGFKVSVYMDDIIVSTSLPLEQAEAALEELKSKATKSRLKLNPEKTIGPVDSICAFNITLTQNNIEISDERLAEFEEELSNTEEQSVIDGILGYVETISPAQAETLRCRQ

SEQ ID NO: 1215 - protein, 256 aa, synthetic construct
  source 1..256: note = MG160-482 reverse transcriptase
MPLHEKWITKFSLKGKTWVFVPNDESITFGAALKQAIEEHWKIPHNYYHFKEGGHVAALRQHIHNSFFLRLDIDNFFGQINRSRITRNLNTFCTYANARQYAIESTVRDPDSKEAKYILPFGFVQSPILASLCLRKSALGGYLSSLSKQPNIVCNVYMDDILISGNDSKKLEDIGGQLEIDASRSRFPLSKTKREGPSESVTAFNVTITQGVLNITQTRMTEFETAFRESNNENQRNGILRYIESVNPSQSASLGA

SEQ ID NO: 1216 - protein, 245 aa, synthetic construct
  source 1..245: note = MG160-483 reverse transcriptase
MTVQFANFEYSFTLKDKPVFKPSERGKAIGLALKEEVERAITFDPFYYHLRDGGHVAALHAHRPHRWFARLDIERFFYGIGRNRVARALAKVGIPKAGYRAKWSCVRNPYNDPRYALPYGFVQSPILATLVLMSSEVGEFLRNLAGAVTASVYMDDIAVSSDDQVLLQEAFDALREVAAQSNFVLNAEKTRAPAEVIELFNCNLFHHVTAVREERRALFYEEPRNDASQLAFERYCDRIEEGNAG

SEQ ID NO: 1217 - protein, 252 aa, synthetic construct
  source 1..252: note = MG160-484 reverse transcriptase
MTPSDQWLYKFRRKSGWVFVPAQATIDYGREVKALIEKHWEAERYYYHLRQGGHVAALRHHRPHRYFLHLDIKTFFGNINASRITRCLKGMLSYAKAREIAIHSTVHHPHAKRLSIFPYGFIQSPIIASACLRESTLGKCLHDLHKQSGLSVSVYMDDIIISSDDIDVLTAAMEKIEQASERCGLPLNKKKQEGPGKMVTAFNIELSQHNLDINAKRLAEFQSTYHASLNPNQKDGILNYVKTINISQAATF

SEQ ID NO: 1218 - protein, 245 aa, synthetic construct
  source 1..245: note = MG160-485 reverse transcriptase
MPVHFKNFTHSFLLNGKTVFAPNDLGRRIGEDIKAKVEAAYEFEPFFYHLTSGGHVAALHAHRESEFFCKADIENFFYSISRNRVVRTLRELGVDRPKHYGKWSCVKNPYHAPRYTLPYGFVQSPILASLILSTSAVGNFLRRISGEVTVGVYVDDISLSSNDPDRLRHCYDGLLSAMEEATLHAKRSKCVPPSREVDIFNCHLKKESTKVLEERRADFFSVHRSGCSAEAFERYCDGVTNGNRL

SEQ ID NO: 1219 - protein, 155 aa, synthetic construct
  source 1..155: note = MG160-486 reverse transcriptase
MAVDSTVRHPIESKRWVLPYGFLQSPILASLALAKSRLGTILDRLHKTSDMSVSVYVDDIIVSCNDLPKLEKACEVLIAAATKAGLAFNAAKCEGPATTITVFNVELTHANLAIIAKRMEEFARDLGLGGEQQRRGILGYVNSINADQAKALATS

SEQ ID NO: 1220 - protein, 244 aa, synthetic construct
  source 1..244: note = MG160-487 reverse transcriptase
MIVNYEFKYRSRGKWFFVPNDKCERRGRRMLAYFKRRVMFPDYMYQFKKGGHVAALHGHLNNHFFFKIDIQNFYYSIARMRVTRALRQWGYPGANTFATWSCVRNPLPGPKHVLPIGFVQSPLLASLALMKSEVADGIERARAKGVCISVYLDDFIGSHDDEALLTAAYEDIRDTCVAAGFIPNPGKLVPPQGAITAFNCDLTNGSAEVTAARIAKYLSRPDRTPLSDAGFGEYRDLVRSQNMS

SEQ ID NO: 1221 - DNA, 1368 bp, synthetic construct
  source 1..1368: mol_type = other DNA; note = MG153-53-S17R_cloned_into_untethered_plasmid
gctagcgccaccatgtacccctatgatgtacctgattatgcttctggcggcagcagcggcggctcaagcggaagtgaaacacctggaacttccgaaagcgctacgcctgaatcttctggtggatcttctggcggatcttccgcatgcaagaagagaaaatggtacagtctggttgacaagatctggaaattcaggaacctcgaagcagctttcagcaaagtaaaagagaaccggggagccgcagggatcgacagagtgagcatcggccagttcgagaggcagaagcaacagaatcttttggagatccaaagacttctgaggagcaaacgctacgaggcaattccagtcagacgcgttgaaatacctaagagcgacggacggtatagacctctgggcattcctacggtcagagatcgcgtggtgcagcaggctacctttgctgttatgtcccctatttttgagacaaagtttctggactgttcttacgggtttaggaagggacgaaatacgcaccaggccattgccaaaatggaacaatacaggaatgagggctgcgagtgggtggtggaagctgatatagagtcattttttgacaccgttaatcacgagttgcttattgatcaggttgctgaggaaatctcagatggttcagtgcttaagcttattaggtcctggctgactgccggcgcatttaaaggaacagaagtgattgagacttctgtgggaacaccacaagggggtgtcatttccccgcttctcgcaaatatatatctgcacccattcgatgtacagatgacagccctgggcttcaagctggtgaggtatgccgatgatttcgtcataatgtgcagaagcgaggacgaggcagaacgggccatggaagccgctacccggatcctctctgggattaaactccgggtaaaggccgctaaaacccgaatagtgcagctgagtaaggacgacggaatcgaatttctcggtttcaccatcttcaaggaacataaggtcccccgaactagagctgtcgagaatttcaaatcacgcattcgcctgatcactcgaagacagaggcccgctacccttcaggagatcatcaaggaactgaatcccgtggtgcggggttggggaaactatttcaaaattgccaacgtaaactggctctacaaaggcttggattcttggatgcgaatgcgccttcggtcttttctcgagaagaagaagagctatgaagccaacaaaaggctggaaaacaaacattttagtgaagcaggcttgactacactgtcctccttgatcgggtaccctaggcctaagaagaaaagaaaggtgggtggttctcctaagaaaaagagaaaggtctgagaattc

SEQ ID NO: 1222 - DNA, 1368 bp, synthetic construct
  source 1..1368: mol_type = other DNA; note = MG153-53-N29R_cloned_into_untethered_plasmid
gctagcgccaccatgtacccctatgatgtacctgattatgcttctggcggcagcagcggcggctcaagcggaagtgaaacacctggaacttccgaaagcgctacgcctgaatcttctggtggatcttctggcggatcttccgcatgcaagaagagaaaatggtacagtctggttgacaagatctggaaattcagtaacctcgaagcagctttcagcaaagtaaaagagaggcggggagccgcagggatcgacagagtgagcatcggccagttcgagaggcagaagcaacagaatcttttggagatccaaagacttctgaggagcaaacgctacgaggcaattccagtcagacgcgttgaaatacctaagagcgacggacggtatagacctctgggcattcctacggtcagagatcgcgtggtgcagcaggctacctttgctgttatgtcccctatttttgagacaaagtttctggactgttcttacgggtttaggaagggacgaaatacgcaccaggccattgccaaaatggaacaatacaggaatgagggctgcgagtgggtggtggaagctgatatagagtcattttttgacaccgttaatcacgagttgcttattgatcaggttgctgaggaaatctcagatggttcagtgcttaagcttattaggtcctggctgactgccggcgcatttaaaggaacagaagtgattgagacttctgtgggaacaccacaagggggtgtcatttccccgcttctcgcaaatatatatctgcacccattcgatgtacagatgacagccctgggcttcaagctggtgaggtatgccgatgatttcgtcataatgtgcagaagcgaggacgaggcagaacgggccatggaagccgctacccggatcctctctgggattaaactccgggtaaaggccgctaaaacccgaatagtgcagctgagtaaggacgacggaatcgaatttctcggtttcaccatcttcaaggaacataaggtcccccgaactagagctgtcgagaatttcaaatcacgcattcgcctgatcactcgaagacagaggcccgctacccttcaggagatcatcaaggaactgaatcccgtggtgcggggttggggaaactatttcaaaattgccaacgtaaactggctctacaaaggcttggattcttggatgcgaatgcgccttcggtcttttctcgagaagaagaagagctatgaagccaacaaaaggctggaaaacaaacattttagtgaagcaggcttgactacactgtcctccttgatcgggtaccctaggcctaagaagaaaagaaaggtgggtggttctcctaagaaaaagagaaaggtctgagaattc

SEQ ID NO: 1223 - DNA, 1368 bp, synthetic construct
  source 1..1368: mol_type = other DNA; note = MG153-53-D77R_cloned_into_untethered_plasmid
gctagcgccaccatgtacccctatgatgtacctgattatgcttctggcggcagcagcggcggctcaagcggaagtgaaacacctggaacttccgaaagcgctacgcctgaatcttctggtggatcttctggcggatcttccgcatgcaagaagagaaaatggtacagtctggttgacaagatctggaaattcagtaacctcgaagcagctttcagcaaagtaaaagagaaccggggagccgcagggatcgacagagtgagcatcggccagttcgagaggcagaagcaacagaatcttttggagatccaaagacttctgaggagcaaacgctacgaggcaattccagtcagacgcgttgaaatacctaagagccgcggacggtatagacctctgggcattcctacggtcagagatcgcgtggtgcagcaggctacctttgctgttatgtcccctatttttgagacaaagtttctggactgttcttacgggtttaggaagggacgaaatacgcaccaggccattgccaaaatggaacaatacaggaatgagggctgcgagtgggtggtggaagctgatatagagtcattttttgacaccgttaatcacgagttgcttattgatcaggttgctgaggaaatctcagatggttcagtgcttaagcttattaggtcctggctgactgccggcgcatttaaaggaacagaagtgattgagacttctgtgggaacaccacaagggggtgtcatttccccgcttctcgcaaatatatatctgcacccattcgatgtacagatgacagccctgggcttcaagctggtgaggtatgccgatgatttcgtcataatgtgcagaagcgaggacgaggcagaacgggccatggaagccgctacccggatcctctctgggattaaactccgggtaaaggccgctaaaacccgaatagtgcagctgagtaaggacgacggaatcgaatttctcggtttcaccatcttcaaggaacataaggtcccccgaactagagctgtcgagaatttcaaatcacgcattcgcctgatcactcgaagacagaggcccgctacccttcaggagatcatcaaggaactgaatcccgtggtgcggggttggggaaactatttcaaaattgccaacgtaaactggctctacaaaggcttggattcttggatgcgaatgcgccttcggtcttttctcgagaagaagaagagctatgaagccaacaaaaggctggaaaacaaacattttagtgaagcaggcttgactacactgtcctccttgatcgggtaccctaggcctaagaagaaaagaaaggtgggtggttctcctaagaaaaagagaaaggtctgagaattc

SEQ ID NO: 1224 - DNA, 1368 bp, synthetic construct
  source 1..1368: mol_type = other DNA; note = MG153-53-G119K_cloned_into_untethered_plasmid
gctagcgccaccatgtacccctatgatgtacctgattatgcttctggcggcagcagcggcggctcaagcggaagtgaaacacctggaacttccgaaagcgctacgcctgaatcttctggtggatcttctggcggatcttccgcatgcaagaagagaaaatggtacagtctggttgacaagatctggaaattcagtaacctcgaagcagctttcagcaaagtaaaagagaaccggggagccgcagggatcgacagagtgagcatcggccagttcgagaggcagaagcaacagaatcttttggagatccaaagacttctgaggagcaaacgctacgaggcaattccagtcagacgcgttgaaatacctaagagcgacggacggtatagacctctgggcattcctacggtcagagatcgcgtggtgcagcaggctacctttgctgttatgtcccctatttttgagacaaagtttctggactgttcttacgggtttaggaagaaacgaaatacgcaccaggccattgccaaaatggaacaatacaggaatgagggctgcgagtgggtggtggaagctgatatagagtcattttttgacaccgttaatcacgagttgcttattgatcaggttgctgaggaaatctcagatggttcagtgcttaagcttattaggtcctggctgactgccggcgcatttaaaggaacagaagtgattgagacttctgtgggaacaccacaagggggtgtcatttccccgcttctcgcaaatatatatctgcacccattcgatgtacagatgacagccctgggcttcaagctggtgaggtatgccgatgatttcgtcataatgtgcagaagcgaggacgaggcagaacgggccatggaagccgctacccggatcctctctgggattaaactccgggtaaaggccgctaaaacccgaatagtgcagctgagtaaggacgacggaatcgaatttctcggtttcaccatcttcaaggaacataaggtcccccgaactagagctgtcgagaatttcaaatcacgcattcgcctgatcactcgaagacagaggcccgctacccttcaggagatcatcaaggaactgaatcccgtggtgcggggttggggaaactatttcaaaattgccaacgtaaactggctctacaaaggcttggattcttggatgcgaatgcgccttcggtcttttctcgagaagaagaagagctatgaagccaacaaaaggctggaaaacaaacattttagtgaagcaggcttgactacactgtcctccttgatcgggtaccctaggcctaagaagaaaagaaaggtgggtggttctcctaagaaaaagagaaaggtctgagaattc

SEQ ID NO: 1225 - DNA, 1368 bp, synthetic construct
  source 1..1368: mol_type = other DNA; note = MG153-53-V200R_cloned_into_untethered_plasmid
gctagcgccaccatgtacccctatgatgtacctgattatgcttctggcggcagcagcggcggctcaagcggaagtgaaacacctggaacttccgaaagcgctacgcctgaatcttctggtggatcttctggcggatcttccgcatgcaagaagagaaaatggtacagtctggttgacaagatctggaaattcagtaacctcgaagcagctttcagcaaagtaaaagagaaccggggagccgcagggatcgacagagtgagcatcggccagttcgagaggcagaagcaacagaatcttttggagatccaaagacttctgaggagcaaacgctacgaggcaattccagtcagacgcgttgaaatacctaagagcgacggacggtatagacctctgggcattcctacggtcagagatcgcgtggtgcagcaggctacctttgctgttatgtcccctatttttgagacaaagtttctggactgttcttacgggtttaggaagggacgaaatacgcaccaggccattgccaaaatggaacaatacaggaatgagggctgcgagtgggtggtggaagctgatatagagtcattttttgacaccgttaatcacgagttgcttattgatcaggttgctgaggaaatctcagatggttcagtgcttaagcttattaggtcctggctgactgccggcgcatttaaaggaacagaagtgattgagacttctgtgggaacaccacaagggggtcgcatttccccgcttctcgcaaatatatatctgcacccattcgatgtacagatgacagccctgggcttcaagctggtgaggtatgccgatgatttcgtcataatgtgcagaagcgaggacgaggcagaacgggccatggaagccgctacccggatcctctctgggattaaactccgggtaaaggccgctaaaacccgaatagtgcagctgagtaaggacgacggaatcgaatttctcggtttcaccatcttcaaggaacataaggtcccccgaactagagctgtcgagaatttcaaatcacgcattcgcctgatcactcgaagacagaggcccgctacccttcaggagatcatcaaggaactgaatcccgtggtgcggggttggggaaactatttcaaaattgccaacgtaaactggctctacaaaggcttggattcttggatgcgaatgcgccttcggtcttttctcgagaagaagaagagctatgaagccaacaaaaggctggaaaacaaacattttagtgaagcaggcttgactacactgtcctccttgatcgggtaccctaggcctaagaagaaaagaaaggtgggtggttctcctaagaaaaagagaaaggtctgagaattc

SEQ ID NO: 1226 - DNA, 1155 bp, synthetic construct
  source 1..1155: mol_type = other DNA; note = MG153-53-hypermutant_cloned_into_untethered_plasmid
aagaagagaaaatggtacagtctggttgacaagatctggaaattcaggaacctcgaagcagctttcagcaaagtaaaagagaggcggggagccgcagggatcgacagagtgagcatcggccagttcgagaggcagaagcaacagaatcttttggagatccaaagacttctgaggagcaaacgctacgaggcaattccagtcagacgcgttgaaatacctaagagccgcggacggtatagacctctgggcattcctacggtcagagatcgcgtggtgcagcaggctacctttgctgttatgtcccctatttttgagacaaagtttctggactgttcttacgggtttaggaagaaacgaaatacgcaccaggccattgccaaaatggaacaatacaggaatgagggctgcgagtgggtggtggaagctgatatagagtcattttttgacaccgttaatcacgagttgcttattgatcaggttgctgaggaaatctcagatggttcagtgcttaagcttattaggtcctggctgactgccggcgcatttaaaggaacagaagtgattgagacttctgtgggaacaccacaagggggtcgcatttccccgcttctcgcaaatatatatctgcacccattcgatgtacagatgacagccctgggcttcaagctggtgaggtatgccgatgatttcgtcataatgtgcagaagcgaggacgaggcagaacgggccatggaagccgctacccggatcctctctgggattaaactccgggtaaaggccgctaaaacccgaatagtgcagctgagtaaggacgacggaatcgaatttctcggtttcaccatcttcaaggaacataaggtcccccgaactagagctgtcgagaatttcaaatcacgcattcgcctgatcactcgaagacagaggcccgctacccttcaggagatcatcaaggaactgaatcccgtggtgcggggttggggaaactatttcaaaattgccaacgtaaactggctctacaaaggcttggattcttggatgcgaatgcgccttcggtcttttctcgagaagaagaagagctatgaagccaacaaaaggctggaaaacaaacattttagtgaagcaggcttgactacactgtcctccttgatcgggtac

SEQ ID NO: 1227 - DNA, 753 bp, synthetic construct
  source 1..753: mol_type = other DNA; note MG160-4-V120R_cloned_into_spCas9(H840A)_tethered_plasmid
gttacccagaagtggacccatcgataccagttgaaacccggccgatgggtttttgcccccacagatgaggccaagaagtgcggtgctcacattaagcgcagcgtggcttccaggtggaaggccccaaacttctactatcacctcagaaatggcgggcacgttgcggccgtacggtcccacgaactgagccggtttttcttccgggcagatttggacgatttctttgggagagtgaaccggtctcgcgtgacccggtgccttaaaccttggttctcatacgccgaagcaagggagatggcctcagaatctgtcgtgaagcgacctggagagacagcctttgtgctgccgtatgggttcaggcagagccctatcctcgcatccttggccctggacaagagtaaactgggtagcctgctgagatcactggacgggggccgcgatttcacggtgagcgtctatgtcgacgacatcattatctctggagacgacgaagctcaacttaaagaggtagcatcccgccttgagagagtggcgagtgaggccctgtttccactcagcagtggcaaaactcagggacccgcctctggagtgactgtttttaacatagaactgtcccatagaatgctcaggattaccgatgataggctcgcttcactgaggctcgactatcaggcgactgcatctgagcattgtaaagctggcatcgtctcctacgtatacagtgtgaatccagatcaggtcgctcaagtgaca

SEQ ID NO: 1228 - DNA, 753 bp, synthetic construct
  source 1..753: mol_type = other DNA; note MG160-4-A29K_cloned_into_spCas9(H840A)_tethered_plasmid
gttacccagaagtggacccatcgataccagttgaaacccggccgatgggtttttgcccccacagatgaggccaagaagtgcggtaagcacattaagcgcagcgtggcttccaggtggaaggccccaaacttctactatcacctcagaaatggcgggcacgttgcggccgtacggtcccacgaactgagccggtttttcttccgggcagatttggacgatttctttgggagagtgaaccggtctcgcgtgacccggtgccttaaaccttggttctcatacgccgaagcaagggagatggcctcagaatctgtcgtgaagcgacctggagagacagcctttgtgctgccgtatgggttcgtgcagagccctatcctcgcatccttggccctggacaagagtaaactgggtagcctgctgagatcactggacgggggccgcgatttcacggtgagcgtctatgtcgacgacatcattatctctggagacgacgaagctcaacttaaagaggtagcatcccgccttgagagagtggcgagtgaggccctgtttccactcagcagtggcaaaactcagggacccgcctctggagtgactgtttttaacatagaactgtcccatagaatgctcaggattaccgatgataggctcgcttcactgaggctcgactatcaggcgactgcatctgagcattgtaaagctggcatcgtctcctacgtatacagtgtgaatccagatcaggtcgctcaagtgaca

SEQ ID NO: 1229 - DNA, 753 bp, synthetic construct
  source 1..753: mol_type = other DNA; note MG160-4-A29R_cloned_into_spCas9(H840A)_tethered_plasmid
gttacccagaagtggacccatcgataccagttgaaacccggccgatgggtttttgcccccacagatgaggccaagaagtgcggtcgtcacattaagcgcagcgtggcttccaggtggaaggccccaaacttctactatcacctcagaaatggcgggcacgttgcggccgtacggtcccacgaactgagccggtttttcttccgggcagatttggacgatttctttgggagagtgaaccggtctcgcgtgacccggtgccttaaaccttggttctcatacgccgaagcaagggagatggcctcagaatctgtcgtgaagcgacctggagagacagcctttgtgctgccgtatgggttcgtgcagagccctatcctcgcatccttggccctggacaagagtaaactgggtagcctgctgagatcactggacgggggccgcgatttcacggtgagcgtctatgtcgacgacatcattatctctggagacgacgaagctcaacttaaagaggtagcatcccgccttgagagagtggcgagtgaggccctgtttccactcagcagtggcaaaactcagggacccgcctctggagtgactgtttttaacatagaactgtcccatagaatgctcaggattaccgatgataggctcgcttcactgaggctcgactatcaggcgactgcatctgagcattgtaaagctggcatcgtctcctacgtatacagtgtgaatccagatcaggtcgctcaagtgaca

SEQ ID NO: 1230 - DNA, 753 bp, synthetic construct
  source 1..753: mol_type = other DNA; note MG160-4-H230K_cloned_into_spCas9(H840A)_tethered_plasmid
gttacccagaagtggacccatcgataccagttgaaacccggccgatgggtttttgcccccacagatgaggccaagaagtgcggtgctcacattaagcgcagcgtggcttccaggtggaaggccccaaacttctactatcacctcagaaatggcgggcacgttgcggccgtacggtcccacgaactgagccggtttttcttccgggcagatttggacgatttctttgggagagtgaaccggtctcgcgtgacccggtgccttaaaccttggttctcatacgccgaagcaagggagatggcctcagaatctgtcgtgaagcgacctggagagacagcctttgtgctgccgtatgggttcgtgcagagccctatcctcgcatccttggccctggacaagagtaaactgggtagcctgctgagatcactggacgggggccgcgatttcacggtgagcgtctatgtcgacgacatcattatctctggagacgacgaagctcaacttaaagaggtagcatcccgccttgagagagtggcgagtgaggccctgtttccactcagcagtggcaaaactcagggacccgcctctggagtgactgtttttaacatagaactgtcccatagaatgctcaggattaccgatgataggctcgcttcactgaggctcgactatcaggcgactgcatctgagaagtgtaaagctggcatcgtctcctacgtatacagtgtgaatccagatcaggtcgctcaagtgaca

SEQ ID NO: 1231 - DNA, 753 bp, synthetic construct
  source 1..753: mol_type = other DNA; note MG160-4-N50K_cloned_into_spCas9(H840A)_tethered_plasmid
gttacccagaagtggacccatcgataccagttgaaacccggccgatgggtttttgcccccacagatgaggccaagaagtgcggtgctcacattaagcgcagcgtggcttccaggtggaaggccccaaacttctactatcacctcagaaagggcgggcacgttgcggccgtacggtcccacgaactgagccggtttttcttccgggcagatttggacgatttctttgggagagtgaaccggtctcgcgtgacccggtgccttaaaccttggttctcatacgccgaagcaagggagatggcctcagaatctgtcgtgaagcgacctggagagacagcctttgtgctgccgtatgggttcgtgcagagccctatcctcgcatccttggccctggacaagagtaaactgggtagcctgctgagatcactggacgggggccgcgatttcacggtgagcgtctatgtcgacgacatcattatctctggagacgacgaagctcaacttaaagaggtagcatcccgccttgagagagtggcgagtgaggccctgtttccactcagcagtggcaaaactcagggacccgcctctggagtgactgtttttaacatagaactgtcccatagaatgctcaggattaccgatgataggctcgcttcactgaggctcgactatcaggcgactgcatctgagcattgtaaagctggcatcgtctcctacgtatacagtgtgaatccagatcaggtcgctcaagtgaca

SEQ ID NO: 1232 - DNA, 753 bp, synthetic construct
  source 1..753: mol_type = other DNA; note MG160-4-N50R_cloned_into_spCas9(H840A)_tethered_plasmid
gttacccagaagtggacccatcgataccagttgaaacccggccgatgggtttttgcccccacagatgaggccaagaagtgcggtgctcacattaagcgcagcgtggcttccaggtggaaggccccaaacttctactatcacctcagaaggggcgggcacgttgcggccgtacggtcccacgaactgagccggtttttcttccgggcagatttggacgatttctttgggagagtgaaccggtctcgcgtgacccggtgccttaaaccttggttctcatacgccgaagcaagggagatggcctcagaatctgtcgtgaagcgacctggagagacagcctttgtgctgccgtatgggttcgtgcagagccctatcctcgcatccttggccctggacaagagtaaactgggtagcctgctgagatcactggacgggggccgcgatttcacggtgagcgtctatgtcgacgacatcattatctctggagacgacgaagctcaacttaaagaggtagcatcccgccttgagagagtggcgagtgaggccctgtttccactcagcagtggcaaaactcagggacccgcctctggagtgactgtttttaacatagaactgtcccatagaatgctcaggattaccgatgataggctcgcttcactgaggctcgactatcaggcgactgcatctgagcattgtaaagctggcatcgtctcctacgtatacagtgtgaatccagatcaggtcgctcaagtgaca

SEQ ID NO: 1233 - DNA, 753 bp, synthetic construct
  source 1..753: mol_type = other DNA; note MG160-4-V120K_cloned_into_spCas9(H840A)_tethered_plasmid
gttacccagaagtggacccatcgataccagttgaaacccggccgatgggtttttgcccccacagatgaggccaagaagtgcggtgctcacattaagcgcagcgtggcttccaggtggaaggccccaaacttctactatcacctcagaaatggcgggcacgttgcggccgtacggtcccacgaactgagccggtttttcttccgggcagatttggacgatttctttgggagagtgaaccggtctcgcgtgacccggtgccttaaaccttggttctcatacgccgaagcaagggagatggcctcagaatctgtcgtgaagcgacctggagagacagcctttgtgctgccgtatgggttcaagcagagccctatcctcgcatccttggccctggacaagagtaaactgggtagcctgctgagatcactggacgggggccgcgatttcacggtgagcgtctatgtcgacgacatcattatctctggagacgacgaagctcaacttaaagaggtagcatcccgccttgagagagtggcgagtgaggccctgtttccactcagcagtggcaaaactcagggacccgcctctggagtgactgtttttaacatagaactgtcccatagaatgctcaggattaccgatgataggctcgcttcactgaggctcgactatcaggcgactgcatctgagcattgtaaagctggcatcgtctcctacgtatacagtgtgaatccagatcaggtcgctcaagtgaca

SEQ ID NO: 1234 - DNA, 753 bp, synthetic construct
  source 1..753: mol_type = other DNA; note MG160-4_H230R_cloned_into_spCas9(H840A)_tethered_plasmid
gttacccagaagtggacccatcgataccagttgaaacccggccgatgggtttttgcccccacagatgaggccaagaagtgcggtgctcacattaagcgcagcgtggcttccaggtggaaggccccaaacttctactatcacctcagaaatggcgggcacgttgcggccgtacggtcccacgaactgagccggtttttcttccgggcagatttggacgatttctttgggagagtgaaccggtctcgcgtgacccggtgccttaaaccttggttctcatacgccgaagcaagggagatggcctcagaatctgtcgtgaagcgacctggagagacagcctttgtgctgccgtatgggttcgtgcagagccctatcctcgcatccttggccctggacaagagtaaactgggtagcctgctgagatcactggacgggggccgcgatttcacggtgagcgtctatgtcgacgacatcattatctctggagacgacgaagctcaacttaaagaggtagcatcccgccttgagagagtggcgagtgaggccctgtttccactcagcagtggcaaaactcagggacccgcctctggagtgactgtttttaacatagaactgtcccatagaatgctcaggattaccgatgataggctcgcttcactgaggctcgactatcaggcgactgcatctgagaggtgtaaagctggcatcgtctcctacgtatacagtgtgaatccagatcaggtcgctcaagtgaca

SEQ ID NO: 1235 - DNA, 753 bp, synthetic construct
  source 1..753: mol_type = other DNA; note MG160-4_E180K_cloned_into_spCas9(H840A)_tethered_plasmid
gttacccagaagtggacccatcgataccagttgaaacccggccgatgggtttttgcccccacagatgaggccaagaagtgcggtgctcacattaagcgcagcgtggcttccaggtggaaggccccaaacttctactatcacctcagaaatggcgggcacgttgcggccgtacggtcccacgaactgagccggtttttcttccgggcagatttggacgatttctttgggagagtgaaccggtctcgcgtgacccggtgccttaaaccttggttctcatacgccgaagcaagggagatggcctcagaatctgtcgtgaagcgacctggagagacagcctttgtgctgccgtatgggttcgtgcagagccctatcctcgcatccttggccctggacaagagtaaactgggtagcctgctgagatcactggacgggggccgcgatttcacggtgagcgtctatgtcgacgacatcattatctctggagacgacgaagctcaacttaaagaggtagcatcccgccttgagagagtggcgagtaaggccctgtttccactcagcagtggcaaaactcagggacccgcctctggagtgactgtttttaacatagaactgtcccatagaatgctcaggattaccgatgataggctcgcttcactgaggctcgactatcaggcgactgcatctgagcattgtaaagctggcatcgtctcctacgtatacagtgtgaatccagatcaggtcgctcaagtgaca

SEQ ID NO: 1236 - DNA, 753 bp, synthetic construct
  source 1..753: mol_type = other DNA; note MG160-4_E180R_cloned_into_spCas9(H840A)_tethered_plasmid
gttacccagaagtggacccatcgataccagttgaaacccggccgatgggtttttgcccccacagatgaggccaagaagtgcggtgctcacattaagcgcagcgtggcttccaggtggaaggccccaaacttctactatcacctcagaaatggcgggcacgttgcggccgtacggtcccacgaactgagccggtttttcttccgggcagatttggacgatttctttgggagagtgaaccggtctcgcgtgacccggtgccttaaaccttggttctcatacgccgaagcaagggagatggcctcagaatctgtcgtgaagcgacctggagagacagcctttgtgctgccgtatgggttcgtgcagagccctatcctcgcatccttggccctggacaagagtaaactgggtagcctgctgagatcactggacgggggccgcgatttcacggtgagcgtctatgtcgacgacatcattatctctggagacgacgaagctcaacttaaagaggtagcatcccgccttgagagagtggcgagtagggccctgtttccactcagcagtggcaaaactcagggacccgcctctggagtgactgtttttaacatagaactgtcccatagaatgctcaggattaccgatgataggctcgcttcactgaggctcgactatcaggcgactgcatctgagcattgtaaagctggcatcgtctcctacgtatacagtgtgaatccagatcaggtcgctcaagtgaca

SEQ ID NO: 1237 - DNA, 753 bp, synthetic construct
  source 1..753: mol_type = other DNA; note MG160-4_E94K_cloned_into_spCas9(H840A)_tethered_plasmid
gttacccagaagtggacccatcgataccagttgaaacccggccgatgggtttttgcccccacagatgaggccaagaagtgcggtgctcacattaagcgcagcgtggcttccaggtggaaggccccaaacttctactatcacctcagaaatggcgggcacgttgcggccgtacggtcccacgaactgagccggtttttcttccgggcagatttggacgatttctttgggagagtgaaccggtctcgcgtgacccggtgccttaaaccttggttctcatacaaggaagcaagggagatggcctcagaatctgtcgtgaagcgacctggagagacagcctttgtgctgccgtatgggttcgtgcagagccctatcctcgcatccttggccctggacaagagtaaactgggtagcctgctgagatcactggacgggggccgcgatttcacggtgagcgtctatgtcgacgacatcattatctctggagacgacgaagctcaacttaaagaggtagcatcccgccttgagagagtggcgagtgaggccctgtttccactcagcagtggcaaaactcagggacccgcctctggagtgactgtttttaacatagaactgtcccatagaatgctcaggattaccgatgataggctcgcttcactgaggctcgactatcaggcgactgcatctgagcattgtaaagctggcatcgtctcctacgtatacagtgtgaatccagatcaggtcgctcaagtgaca

SEQ ID NO: 1238 - DNA, 753 bp, synthetic construct
  source 1..753: mol_type = other DNA; note MG160-4_D245K_cloned_into_spCas9(H840A)_tethered_plasmid
gttacccagaagtggacccatcgataccagttgaaacccggccgatgggtttttgcccccacagatgaggccaagaagtgcggtgctcacattaagcgcagcgtggcttccaggtggaaggccccaaacttctactatcacctcagaaatggcgggcacgttgcggccgtacggtcccacgaactgagccggtttttcttccgggcagatttggacgatttctttgggagagtgaaccggtctcgcgtgacccggtgccttaaaccttggttctcatacgccgaagcaagggagatggcctcagaatctgtcgtgaagcgacctggagagacagcctttgtgctgccgtatgggttcgtgcagagccctatcctcgcatccttggccctggacaagagtaaactgggtagcctgctgagatcactggacgggggccgcgatttcacggtgagcgtctatgtcgacgacatcattatctctggagacgacgaagctcaacttaaagaggtagcatcccgccttgagagagtggcgagtgaggccctgtttccactcagcagtggcaaaactcagggacccgcctctggagtgactgtttttaacatagaactgtcccatagaatgctcaggattaccgatgataggctcgcttcactgaggctcgactatcaggcgactgcatctgagcattgtaaagctggcatcgtctcctacgtatacagtgtgaatccaaagcaggtcgctcaagtgaca

SEQ ID NO: 1239 - DNA, 753 bp, synthetic construct
  source 1..753: mol_type = other DNA; note MG160-4_D245S_cloned_into_spCas9(H840A)_tethered_plasmid
gttacccagaagtggacccatcgataccagttgaaacccggccgatgggtttttgcccccacagatgaggccaagaagtgcggtgctcacattaagcgcagcgtggcttccaggtggaaggccccaaacttctactatcacctcagaaatggcgggcacgttgcggccgtacggtcccacgaactgagccggtttttcttccgggcagatttggacgatttctttgggagagtgaaccggtctcgcgtgacccggtgccttaaaccttggttctcatacgccgaagcaagggagatggcctcagaatctgtcgtgaagcgacctggagagacagcctttgtgctgccgtatgggttcgtgcagagccctatcctcgcatccttggccctggacaagagtaaactgggtagcctgctgagatcactggacgggggccgcgatttcacggtgagcgtctatgtcgacgacatcattatctctggagacgacgaagctcaacttaaagaggtagcatcccgccttgagagagtggcgagtgaggccctgtttccactcagcagtggcaaaactcagggacccgcctctggagtgactgtttttaacatagaactgtcccatagaatgctcaggattaccgatgataggctcgcttcactgaggctcgactatcaggcgactgcatctgagcattgtaaagctggcatcgtctcctacgtatacagtgtgaatccaagccaggtcgctcaagtgaca

SEQ ID NO: 1240 - DNA, 753 bp, synthetic construct
  source 1..753: mol_type = other DNA; note MG160-4_V120R_A29R_H230K_N50R_cloned_into_spCas9(H840A)_tet hered_plasmid
gttacccagaagtggacccatcgataccagttgaaacccggccgatgggtttttgcccccacagatgaggccaagaagtgcggtcgtcacattaagcgcagcgtggcttccaggtggaaggccccaaacttctactatcacctcagaaggggcgggcacgttgcggccgtacggtcccacgaactgagccggtttttcttccgggcagatttggacgatttctttgggagagtgaaccggtctcgcgtgacccggtgccttaaaccttggttctcatacgccgaagcaagggagatggcctcagaatctgtcgtgaagcgacctggagagacagcctttgtgctgccgtatgggttcaggcagagccctatcctcgcatccttggccctggacaagagtaaactgggtagcctgctgagatcactggacgggggccgcgatttcacggtgagcgtctatgtcgacgacatcattatctctggagacgacgaagctcaacttaaagaggtagcatcccgccttgagagagtggcgagtgaggccctgtttccactcagcagtggcaaaactcagggacccgcctctggagtgactgtttttaacatagaactgtcccatagaatgctcaggattaccgatgataggctcgcttcactgaggctcgactatcaggcgactgcatctgagaagtgtaaagctggcatcgtctcctacgtatacagtgtgaatccagatcaggtcgctcaagtgaca

SEQ ID NO: 1241 - DNA, 753 bp, synthetic construct
  source 1..753: mol_type = other DNA; note MG160-4_V120R_A29R_H230K_N50K_cloned_into_spCas9(H840A)_tet hered_plasmid
gttacccagaagtggacccatcgataccagttgaaacccggccgatgggtttttgcccccacagatgaggccaagaagtgcggtcgtcacattaagcgcagcgtggcttccaggtggaaggccccaaacttctactatcacctcagaaagggcgggcacgttgcggccgtacggtcccacgaactgagccggtttttcttccgggcagatttggacgatttctttgggagagtgaaccggtctcgcgtgacccggtgccttaaaccttggttctcatacgccgaagcaagggagatggcctcagaatctgtcgtgaagcgacctggagagacagcctttgtgctgccgtatgggttcaggcagagccctatcctcgcatccttggccctggacaagagtaaactgggtagcctgctgagatcactggacgggggccgcgatttcacggtgagcgtctatgtcgacgacatcattatctctggagacgacgaagctcaacttaaagaggtagcatcccgccttgagagagtggcgagtgaggccctgtttccactcagcagtggcaaaactcagggacccgcctctggagtgactgtttttaacatagaactgtcccatagaatgctcaggattaccgatgataggctcgcttcactgaggctcgactatcaggcgactgcatctgagaagtgtaaagctggcatcgtctcctacgtatacagtgtgaatccagatcaggtcgctcaagtgaca

SEQ ID NO: 1242 - DNA, 753 bp, synthetic construct
  source 1..753: mol_type = other DNA; note MG160-4_V120R_A29K_H230K_N50R_cloned_into_spCas9(H840A)teth ered_plasmid
gttacccagaagtggacccatcgataccagttgaaacccggccgatgggtttttgcccccacagatgaggccaagaagtgcggtaagcacattaagcgcagcgtggcttccaggtggaaggccccaaacttctactatcacctcagaaggggcgggcacgttgcggccgtacggtcccacgaactgagccggtttttcttccgggcagatttggacgatttctttgggagagtgaaccggtctcgcgtgacccggtgccttaaaccttggttctcatacgccgaagcaagggagatggcctcagaatctgtcgtgaagcgacctggagagacagcctttgtgctgccgtatgggttcaggcagagccctatcctcgcatccttggccctggacaagagtaaactgggtagcctgctgagatcactggacgggggccgcgatttcacggtgagcgtctatgtcgacgacatcattatctctggagacgacgaagctcaacttaaagaggtagcatcccgccttgagagagtggcgagtgaggccctgtttccactcagcagtggcaaaactcagggacccgcctctggagtgactgtttttaacatagaactgtcccatagaatgctcaggattaccgatgataggctcgcttcactgaggctcgactatcaggcgactgcatctgagaagtgtaaagctggcatcgtctcctacgtatacagtgtgaatccagatcaggtcgctcaagtgaca

SEQ ID NO: 1243 - DNA, 753 bp, synthetic construct
  source 1..753: mol_type = other DNA; note MG160-4_V120R_A29K_H230K_N50K_cloned_into_spCas9(H840A)_tet hered_plasmid
gttacccagaagtggacccatcgataccagttgaaacccggccgatgggtttttgcccccacagatgaggccaagaagtgcggtaagcacattaagcgcagcgtggcttccaggtggaaggccccaaacttctactatcacctcagaaagggcgggcacgttgcggccgtacggtcccacgaactgagccggtttttcttccgggcagatttggacgatttctttgggagagtgaaccggtctcgcgtgacccggtgccttaaaccttggttctcatacgccgaagcaagggagatggcctcagaatctgtcgtgaagcgacctggagagacagcctttgtgctgccgtatgggttcaggcagagccctatcctcgcatccttggccctggacaagagtaaactgggtagcctgctgagatcactggacgggggccgcgatttcacggtgagcgtctatgtcgacgacatcattatctctggagacgacgaagctcaacttaaagaggtagcatcccgccttgagagagtggcgagtgaggccctgtttccactcagcagtggcaaaactcagggacccgcctctggagtgactgtttttaacatagaactgtcccatagaatgctcaggattaccgatgataggctcgcttcactgaggctcgactatcaggcgactgcatctgagaagtgtaaagctggcatcgtctcctacgtatacagtgtgaatccagatcaggtcgctcaagtgaca

SEQ ID NO: 1244 - skipped

SEQ ID NO: 1245 - DNA, 147 bp, synthetic construct
  source 1..147: mol_type = other DNA; note = linker 1 for untethered RT
gctagcgccaccatgtacccctatgatgtacctgattatgcttctggcggcagcagcggcggctcaagcggaagtgaaacacctggaacttccgaaagcgctacgcctgaatcttctggtggatcttctggcggatcttccgcatgc

SEQ ID NO: 1246 - DNA, 66 bp, synthetic construct
  source 1..66: mol_type = other DNA; note = linker 2 for untethered RT
cctaggcctaagaagaaaagaaaggtgggtggttctcctaagaaaaagagaaaggtctgagaattc

SEQ ID NO: 1247 - DNA, 4101 bp, synthetic construct
  source 1..4101: mol_type = other DNA; note = spCas9(H840A)_untethered_or_tethered_plasmid
gataagaaatatagtattgggttggatattggtacgaatagtgtaggatgggcggttattactgacgaatataaagtcccctctaagaagtttaaagtcctcggtaatacagataggcatagtattaagaagaatcttattggcgctctcttatttgattccggtgagactgctgaagctacaaggttaaagaggactgctcgccggcgctatacacgaaggaagaatcgcatatgttaccttcaggaaatatttagtaatgaaatggcaaaagtcgatgattcattcttccatcgacttgaggaatcatttctcgttgaggaagacaagaagcatgaaaggcatccaatctttggaaatatagtcgatgaagtagcttatcatgagaaatatccgactatttatcatttgcgaaagaagcttgtcgattctacagataaagcggatcttaggcttatatacctcgcactcgctcatatgattaaatttaggggtcattttctgattgaaggggatctcaatcctgataattccgatgtagataagctctttattcaacttgtacaaacatataatcaattatttgaagagaatcctattaatgcttctggagtcgatgcaaaagcgattttgagcgctcgcctttccaaaagtcgcagacttgagaacttgattgctcaactcccaggtgaaaagaagaacggactctttggtaatttgatcgcattgagtcttgggttgactccaaattttaaaagtaattttgatttggctgaagacgcaaagctccaattgtccaaagatacttatgatgatgatttggataatttattagcccaaattggagatcaatatgctgatctcttcctcgcagctaagaatctctcagatgcaattttgttgtctgatatacttcgcgtaaatactgaaattacaaaagctcctctctccgcaagcatgataaaacggtatgatgaacatcatcaagatcttactcttcttaaggccttagtacgccaacaacttccggagaaatataaggaaatcttctttgatcaatcaaagaatgggtatgcagggtatatagatggcggcgcgtcacaagaggaattttataaatttataaaaccgattcttgagaaaatggatggaacagaagagcttttggtcaaattaaatagggaagatttgttgaggaaacaaagaacctttgataatgggtctattccacatcaaatacatcttggcgaattgcacgcgatactcaggcgacaagaggacttctatccttttcttaaagataatcgcgagaaaattgaaaagattctcacgtttcggattccttattatgttggaccgttagcgcggggtaattcacggtttgcttggatgactaggaaatcagaagagactattacgccttggaattttgaagaggttgtcgataaaggagcctcagctcaatcttttattgaacgaatgactaattttgacaagaatctccctaatgaaaaggtcttgcctaaacatagtcttctctatgaatattttacagtctacaatgaattgacaaaggttaagtatgtcacagaaggtatgaggaaacctgcatttctgagtggggaacaaaagaaagcgattgtcgatctcctctttaaaacgaatagaaaggtcacggtaaaacaattaaaggaagattattttaagaagattgaatgttttgattcagtcgagatatctggggtcgaggacagatttaatgcaagcttgggtacctatcatgacttgctcaagatcattaaagataaagattttctcgataacgaagagaatgaagatatccttgaggacatagtccttactctcaccctcttcgaagatcgggaaatgattgaagagcgccttaagacatacgcacatctctttgatgataaggttatgaaacaactcaaacgccgacggtatacaggatggggaagacttagtcgcaaactcataaatggaataagggataaacaatcaggaaagaccattcttgactttcttaaatctgatggatttgcaaatcgcaatttcatgcaactcattcatgatgattccctcacattcaaggaagatatacaaaaggcacaagtcagtgggcaaggggactcccttcatgaacatatcgcaaaccttgctggttctcctgcaatcaagaagggaatactccaaactgtaaaagtcgtcgatgaacttgttaaggtaatgggacgccataaaccggaaaatattgtaatagagatggcgcgagaaaatcaaacgactcaaaagggccagaagaatagcagagaaaggatgaaacgcatagaggaagggataaaggaattggggtcccaaattttgaaggagcatccagtagagaatactcaattgcaaaatgagaaactctatctttattatctccaaaacggcagggacatgtatgtcgatcaagagttagatataaatcgccttagtgattatgacgtagatgcaattgtcccccaatccttccttaaagatgatagtattgataataaagtcttgactaggagtgataagaatcgcgggaaaagtgataatgtaccatctgaggaagtagtaaagaaaatgaagaattattggcgacaactcctcaatgcaaaattgatcacgcaacgaaaatttgataacttgacgaaagctgaacggggcggactctccgagcttgacaaagcagggtttattaaacgccaattggtcgagactagacaaattacgaaacatgttgctcaaattcttgatagcagaatgaataccaaatatgatgaaaacgataaattgattcgagaggtcaaggtaattacactcaaatcaaaattagtctctgactttaggaaagactttcaattctataaggtaagggaaattaataattatcatcatgcgcatgatgcatatttgaatgctgtggtcggcacagcgttgattaagaaatatcccaaattagagtcagaatttgtttatggagattataaagtctatgatgttaggaaaatgattgcaaagtctgagcaagagattgggaaagcgacagcaaaatatttcttttatagtaatattatgaacttctttaaaacggaaatcactctcgctaatggggaaattcgcaaaagaccccttattgaaactaatggtgagacaggcgaaattgtttgggacaaaggacgtgacttcgctacagtccgcaaggttctttctatgccacaggtaaacattgttaagaaaactgaagtccaaactggcggtttctccaaggaaagcattctccctaaacgcaatagtgacaaattgattgcaaggaagaaggattgggatccaaagaaatatggtgggtttgattcaccgacagttgcgtacagtgtccttgttgtagctaaggtagagaaaggaaaatccaagaagcttaaatcagttaaggaattattaggcattacaattatggagaggtccagttttgagaagaacccgatagatttcttagaggctaaagggtacaaagaggttaagaaagatcttattataaaacttccaaaatatagtctctttgaactggagaatggacgaaaacgaatgcttgcaagtgctggagagttacaaaagggcaatgagctcgctttaccaagcaagtacgtaaattttctctatcttgcatcccattacgaaaagttgaaaggtagtccagaagacaacgaacaaaagcaattattcgtagagcaacataaacattatcttgatgaaattattgaacagattagtgaattttcaaaacgcgttatactcgcagatgccaacttagataaggtactctctgcttataataaacatagggacaaacctatacgagaacaagcggaaaacattattcatttgttcacactcactaacctcggcgctccagctgcttttaaatatttcgatactacaatagatagaaaacgttatacttctacaaaggaagtcttagatgctacactcattcatcaaagtattacaggattatatgaaactcgtatagatctctcacaactcggcggggat

SEQ ID NO: 1248 - DNA, 2073 bp, synthetic construct
  source 1..2073: mol_type = other DNA; note = MMLV1_cloned_into_untethered_or_tethered_plasmid
actctgaacatcgaggacgaatacaggctccacgaaacttctaaggaacctgacgtgtccttgggatcaacttggttgtccgacttcccccaagcttgggccgagacaggcggaatgggtttggccgtgagacaggccccactcataatcccacttaaggcgacatccactccggtcagtatcaagcagtatccaatgtcccaggaagcacgcttaggaattaaaccacatattcaacgactcctggatcaaggtattctcgtcccatgtcaaagcccttggaatacccctcttctgcctgtgaagaagcccggcacaaacgactaccggcccgtgcaagacctcagggaagtgaataaacgagtcgaggatatacatccgactgtcccgaatccctataatctgctgtcaggtctgccaccaagtcatcaatggtatacagtactggacctgaaagacgcgttcttttgtttgcgactgcatcctacgtctcaaccgctgtttgcattcgaatggcgggaccccgaaatggggatttctgggcagctgacatggactcgtcttcctcaagggtttaagaactcccctacacttttcgacgaagccctgcatcgggatttagctgattttagaatccaacatcctgatctgattctcctgcaatatgttgacgatctgctcctcgctgcaaccagtgaacttgattgtcagcagggaacgagagctttactccagactctgggcaatcttggttaccgtgcttcagctaagaaggctcagatatgtcaaaagcaagtgaaataccttggttacctgttgaaggaagggcaacgctggttaaccgaagctcgcaaggaaacagtaatgggccaacccacacccaaaacaccccgccagctgagagaatttctcggtacagctggattttgcagactgtggattcccggtttcgccgagatggccgcacctctttatccactgacgaagactggtaccctcttcaactggggacccgatcagcagaaagcttaccaggagattaaacaggcactgctgaccgctcccgcgctcggcctgcccgacctgacgaaaccattcgagcttttcgtggatgagaaacaaggatatgctaagggagtgctgactcagaagcttgggccgtggcgacgcccagtagcttatctcagcaagaaactggatcctgtggccgccggttggccgccatgtttgagaatggttgccgctatcgcagtcctcaccaaagacgccggtaaactgacaatggggcaacctctggtgatcctcgctccgcacgctgtggaagccttagtgaagcagccacctgataggtggttaagcaatgcgagaatgacccattaccaagcgttattgctggataccgatagagtgcaatttggccccgttgtcgctctcaatcccgcgactcttctgcccttaccagaagagggacttcagcataattgtttggacattctcgcagaggctcatggcactcggccagatctcaccgatcaaccccttcctgatgctgatcatacttggtatactgacggctcatccctgctgcaggaaggccaaagaaaagccggcgccgctgtcacaacagaaactgaagtgatttgggccaaggcactccctgcaggaactagcgcccaaagagccgagctcatcgcccttactcaagctctcaaaatggccgagggcaagaaacttaacgtgtacacagactccaggtacgccttcgccacagcacacattcacggcgagatctatcgccgaaggggacttctgacgagtgagggaaaggaaattaagaacaaggatgaaatactggcgctgctgaaggctctgtttctccctaagcggctgtccattattcactgccctggtcaccagaaagggcattccgctgaagccaggggcaataggatggcagatcaggctgcaaggaaagctgcaattaccgaaacgcccgatacgagcacacttcttatcgagaactcttccccttcaggcggtagcaagcggacagcagatggatccgagtttgaa

SEQ ID NO: 1249 - DNA, 2073 bp, synthetic construct
  source 1..2073: mol_type = other DNA; note = MMLV2_cloned_into_untethered_or_tethered_plasmid
actctgaacatcgaggacgaatacaggctccacgaaacttctaaggaacctgacgtgtccttgggatcaacttggttgtccgacttcccccaagcttgggccgagacaggcggaatgggtttggccgtgagacaggccccactcataatcccacttaaggcgacatccactccggtcagtatcaagcagtatccaatgtcccaggaagcacgcttaggaattaaaccacatattcaacgactcctggatcaaggtattctcgtcccatgtcaaagcccttggaatacccctcttctgcctgtgaagaagcccggcacaaacgactaccggcccgtgcaagacctcagggaagtgaataaacgagtcgaggatatacatccgactgtcccgaatccctataatctgctgtcaggtctgccaccaagtcatcaatggtatacagtactggacctgaaagacgcgttcttttgtttgcgactgcatcctacgtctcaaccgctgtttgcattcgaatggcgggaccccgaaatggggatttctgggcagctgacatggactcgtcttcctcaagggtttaagaactcccctacacttttcaacgaagccctgcatcgggatttagctgattttagaatccaacatcctgatctgattctcctgcaatatgttgacgatctgctcctcgctgcaaccagtgaacttgattgtcagcagggaacgagagctttactccagactctgggcaatcttggttaccgtgcttcagctaagaaggctcagatatgtcaaaagcaagtgaaataccttggttacctgttgaaggaagggcaacgctggttaaccgaagctcgcaaggaaacagtaatgggccaacccacacccaaaacaccccgccagctgagagaatttctcggtaaggctggattttgcagactgttcattcccggtttcgccgagatggccgcacctctttatccactgacgaagcccggtaccctcttcaactggggacccgatcagcagaaagcttaccaggagattaaacaggcactgctgaccgctcccgcgctcggcctgcccgacctgacgaaaccattcgagcttttcgtggatgagaaacaaggatatgctaagggagtgctgactcagaagcttgggccgtggcgacgcccagtagcttatctcagcaagaaactggatcctgtggccgccggttggccgccatgtttgagaatggttgccgctatcgcagtcctcaccaaagacgccggtaaactgacaatggggcaacctctggtgatcctcgctccgcacgctgtggaagccttagtgaagcagccacctgataggtggttaagcaatgcgagaatgacccattaccaagcgttattgctggataccgatagagtgcaatttggccccgttgtcgctctcaatcccgcgactcttctgcccttaccagaagagggacttcagcataattgtttggacattctcgcagaggctcatggcactcggccagatctcaccgatcaaccccttcctgatgctgatcatacttggtatactgacggctcatccctgctgcaggaaggccaaagaaaagccggcgccgctgtcacaacagaaactgaagtgatttgggccaaggcactccctgcaggaactagcgcccaaagagccgagctcatcgcccttactcaagctctcaaaatggccgagggcaagaaacttaacgtgtacacagactccaggtacgccttcgccacagcacacattcacggcgagatctatcgccgaaggggatggctgacgagtgagggaaaggaaattaagaacaaggatgaaatactggcgctgctgaaggctctgtttctccctaagcggctgtccattattcactgccctggtcaccagaaagggcattccgctgaagccaggggcaataggatggcagatcaggctgcaaggaaagctgcaattaccgaaacgcccgatacgagcacacttcttatcgagaactcttccccttcaggcggtagcaagcggacagcagatggatccgagtttgaa

SEQ ID NO: 1250 - DNA, 759 bp, synthetic construct
  source 1..759: mol_type = other DNA; note = MG160-473_cloned_into_tethered_plasmid
atggaagcctggaaacataagtttgagatcaagaaggacaggtgggtccacgtaccaagcaaggacatggtgatcttcgggaaaaagttgcacaaatttatcagaagaaagtggaatcctcccttttactactatcacctccggaacgggggtcatgttattgccgctaagaatcacaaacataatgactttttcagtgctatagatatatctaacttcttcgaatcaacatcacaaagcagggtgacccgcgagcttaagactatcctcccatataatcaggcccgggaggtcgcaaagatttcaacggtccgagtgcccggaagcaaggataaaaagttctcaatcccttatggctacccacagtcccctatacttgctagtttctgtttgcgaaactcctacgtaggcaatgtgctggacagcatcaataaaggtggacttatcctggtgtctgtctatatggatgatatagtgctgtcttccaaagacctcaatgtgttgaacgatgcatttaatctgatttgcaacgcccttaaaaaaagtcactaccagattaacattgacaaaacccagcccccgagcgaaaagatcagggttttcaacctggagctgtctcatgaccagatcaaggtgtgctccgatcgcctcattcagttcattcaggcctacgcaaaaacacagaacgagtttgaacggaaaggcatcgctgcatatattagaagtgttaaccctcaacaagccaatctgcactttccc

SEQ ID NO: 1251 - DNA, 765 bp, synthetic construct
  source 1..765: mol_type = other DNA; note = MG160-46_cloned_into_tethered_plasmid
atgccctcattgtggaaaaacaaattcgaaattaaaccggggtactgggtgttcgagccctcagaggaatgcagagttataggaaatgaactgaaaaacatcatcctgggcaagtggcaaccaccagactattacttccactttcagtatggcgggcatgtggccgctgccaagagtcacttcggaaacattttcttcctgaagctcgacctgagtaaatttttttattcaattaatcgctctcggatcacacgcaatctgaaggagttcttcgagtatagcacggcaagagattacgccaaatcttctactgtcagggaccctaacaataagtacaaattttttctcccttatggttacgtgcaaagtttgtgcctcgctagtctggcacttagcaagagccagcttggcactgaactcaacaagattcggaagaataatggttgtacaatctccgtctatgtggacgatctgatcatctctagcaacaacatcgagctgctttataaaataaaagatgtggtaatcgacagcgctaaaaaatccaagtttcttatcaatgaaaataagactgagggcccctccacccttataacagcctttaacttcgatattagctacaactccgttaagattaatgaaaccaggttttacgagctcctggaaaatcataagaagtccgatcttatgacccagaaagagggaatagaggggtacgtccgatctgtagacttgaaccagtatcagttctttatgtcattgatt

SEQ ID NO: 1252 - DNA, 747 bp, synthetic construct
  source 1..747: mol_type = other DNA; note = MG160-143_cloned_into_tethered_plasmid
atgagcgccccactcatcgagaattacagattcaaatacaagtccagaggcaagtggatctatgttcccaatgacaggtgcctgcagcggcccaaacagattattaagttctttaaaagagacatttcctttcctgcatacttctaccactataagccaggaggccatgttgccgccctgcatgaccacctcaaaaatgactttttcagtaaaattgacatacaaaacttcttctactcaatcgctaggaacagggtggcaagagcatttgcatctaagggcttgcgcggagctccaacgtatgccaaatggtctaccgtccgatcaccctatgagaatgggccccgatacgtcctccctattggattttggcagagtccgcacatcgcttctctggtactgatgcaaagccctgtggccaacgccatcgaacgagcccgggataagggtgtgttggtgagcgtctatctggatgattttgtgggcagccatggagacgatgctcttttgcgggatgtttacggggatatacaggcagcttgtgtcgaagccaatctggcccctaacgagaacaaacttgtggcaccaaacaaggccattgttgctttcaattgcaaccttacaaagggtctggctaaggtgactgatgagcgcatcgctaaattctttagtgtgggcaggtcagacatagggaggcagtcctttgaggactatctcgaacgggtagaaagagccaatgcacgcgct

SEQ ID NO: 1253 - DNA, 735 bp, synthetic construct
  source 1..735: mol_type = other DNA; note = MG160-154_cloned_into_tethered_plasmid
atggccgtcgcattcgagaattatctttatagcaatccgaccgaaaaaggtaagccatatttcgtgccaaccgaccggtgccgccgcatcggagcagagaccatgactcttgtgagagcaagagtgaaatttgaacatcattactatcactttagtaagggggctcacgtagccgctctgcacgcccatcgggcccatcggtattttgcaagactcgatatacagaacttcttttattcagtaggtaggaacagggttaagagcgcccttaaggacataggagttccctacgctgaacactttgccaaatggagtacagtccgaaatccctacgatgatccccgctacgctttgccctacgggttcgtgcaatcccctttgctggcatctttggttctgaggcagtcagctatcggcaccgccatcagagacctccctgtgagaattaaacgaagcgtttacctggatgatattgccctgtctgcaaataaacgggatgacctcgaggaggccttcgagacagtgatcgccgctgtggaggccgctaattttacgctgaacgaggctaaagtaatcggcccttccactgacattacactgtttaactgtgacctctcaagcggaatgactaaggtctccgatccacgaattgcaaagttctacgacgctcctgcatctgaagaatccgtggccgggttcgaagcctatttggctagtgtcgaggcaggcaacagg

SEQ ID NO: 1254 - DNA, 741 bp, synthetic construct
  source 1..741: mol_type = other DNA; note = MG160-353_cloned_into_tethered_plasmid
atgcccgtgcggttcgagaatttcgagtattcatacacgagacaaggaaggccctacttttccccttccccactcggtagaaagattggcaacgacattaagagccaggtcgaaaatgcacacaccttcgatccattcgtttatcacctccgaggcggaggccacgtggcagcagtgcactcacatcgcgctcatcacctttttgctcgggtggacatccgaagattcttctacgggatttctaggtcaagggtccagagggccctgcagaacatcgggatcttgagggcccggcactacgctaaatggtcctgtgttaagaacccatattctgaaccaccgtatagcctgccttatggctttgtccagagtcccgtcctcgccacattggtcctgatgcagagcgaagtgggaaatattctgcggatctttgacgcagaccctgttataaccgtgagtgtgtacatggatgacataacactgtccagtgatgaccgcgcaaaactgcaggtagcctatcttgatctgttgactagtctggctactgctaatttcgatgtttcaccgcgcaagctcagacccccagcctccgaggtagacgtttttaattgcgatcttaaacatggatctacagaggtgcgccctgatagagtagccgagtttctcgggagcaatcccaaccatgcttctatggtggggtttgcccgataccaaatgagcgtggaagccggtaacacccct

SEQ ID NO: 1255 - DNA, 732 bp, synthetic construct
  source 1..732: mol_type = other DNA; note = MG160-487_cloned_into_tethered_plasmid
atgattgtgaactacgaatttaagtatcggtcccgcggcaagtggtttttcgtacctaatgacaaatgcgagaggagaggtcgaaggatgctcgcatattttaaaagaagggtcatgttcccggattacatgtaccagtttaaaaaagggggccatgttgccgccttgcatgggcatcttaacaaccactttttcttcaagattgacatccaaaacttctactatagtatagcacgcatgagagtgaccagggcccttcgccagtgggggtatcccggcgctaacacattcgctacatggtcctgtgtgcggaatccactccccggaccaaaacacgttctgcccatcggtttcgtgcaaagccctctcttggcttcactggcactgatgaagtctgaagttgccgacggaattgagcgagcacgagctaagggggtgtgtatctctgtgtacttggatgattttatcggaagccacgacgacgaagcccttctcaccgcagcatacgaggatataagggacacgtgcgtggccgctggatttattcctaatcctggtaaactggtcccaccccagggagccatcactgcattcaattgcgatctgaccaatggcagtgccgaggtcacagctgcccggattgccaagtatcttagccggccagatcgcactccgctgtcagatgctggctttggcgaatatagagacctggtaagatcccagaatatgtct

SEQ ID NO: 1256 - DNA, 780 bp, synthetic construct
  source 1..780: mol_type = other DNA; note = MG160-283_cloned_into_tethered_plasmid
atgccattctcctctaaatgggttttcaagtatccaatcaaaagttactcatggatttttattcctaccgagagcaccatcaagaatggaaagataattaaaagtataattgaaaagaactgggtggctccgaattacttctatcatttgaaaaaaggaggtcatgtgaaggccctgaagatacacaaggaaaatagtttctttattcacctggacattcaagacttctttgggcacatcaacaagtccagagtgactcgctgccttaagagcttcctgggctatgagcgggccaggaaaatcgccaaagaatctacagtgaacatctttaagaagacgtcaaaaaagaccattagtatattgccctttgggtttgtccagagccccatcatcgcttctctgtgttttcacaagagcaagctgggtaaatacctgcacaacattaacggcaaacatggagtctacgtcagcgtatacatggatgacattatagtttcatctcctaacaagctcaatcttgaaaaaattttctataatatcgaggttctcagcgtgtattccaagttccccttgaacatcgaaaaaaaagatgaaccttccaatcagattacagcatttaacatccatctctctcacaatctcctggagatcactgatataaaacttaatgagtttaagaataaggtaaaagactcccagaacatttatgagatcaacggcatcatctcatacatttcaagtatcaataaggagcaggcaaaattcttcgtgaataacata

SEQ ID NO: 1257 - DNA, 741 bp, synthetic construct
  source 1..741: mol_type = other DNA; note = MG160-477_cloned_into_untethered_plasmid
atgcttgaaaactacaaacacaaatatacttcaaggggaaaattcatctttgtacctacgcccgagtgcgatcgaagagccgacaggctcttgcggttcgcagaagatatagagctgcctccctatttcttccattacaggaggggcgggcacgtggaagctcttcatcagcatctggaaagacgctattttttccggatagatctgaagaattttttttactcaatcagtcggaacagggtgaaccgaattttgagacagagtggattccgctccgcccgagagtggagcgaatggtctacagtcagaaacccatacaatgtggggccccggtatgtcctccctattggctttaagcagagcccgctcctggcttcactggccttgtggcgcagcgccgtcgcatcttctattgaagaggcaggtgagcggggcgtgtttgttagtgtgtacttcgacgaccttatcggaagctccaacgatgagaatgaactgagagttacatacgccggtctgctcgcagcctgtgagcaagctaatctcgtcgccaacgaagccaagttgatcgagccagctaatgccattgtggcattcaattgccacctgacccacggcagagcaaatgtgaccgatgagcgcatccagcggtttattgacgaggtaagggggccaaacgctgagacttccttcatcgactattgtataagagtgcaacgatttaaccgcgctatggaagttaat

SEQ ID NO: 1258 - DNA, 774 bp, synthetic construct
  source 1..774: mol_type = other DNA; note = MG160-47_cloned_into_untethered_plasmid
atgctcccaaactatgaacacgcatttaaaaactccaatgggaaatggatttttgtgccaaccgatgaaagtagggagcagggatatgctattcttaaggagatccacgactactgggaggcccctaaatacttttatcacctgcagacaggaggacacgtggccgccctcaaagcacatcagaataagaagttttatgtacgcgcagatataaagcggtttttcagctctatcagtaggaatagaattgttagctctttgaaaaaaaccgggcttttttacaagaggtctaaggaaatcgccgatacaagcactgtgatgtcaaaggagaccccgcacaagaaagtcttgcccttcggcttcgtacagtcccccatcctggcctcaattgcacttgaccattcagctgttgggaagttcttgagaagcgatatagtgggcgtcactagaaccgtctacgccgatgacttcctgtactcatccgacgacaaagagattcttcagaagacttatctggatctgcagaagtccatcagccaatctggtttcgctatcaataatggcaagagtcatgctcctcaagaacagacatgcattttcaacgtggacataacgaaaaactctctgaaaatctcagactcccggtatcaagaatttactgatgagatgttcggcatgaatcgactgcgcagtgaagctattgcccattacgtgcgaacaatcaatctggagcagagcaacaagctcctgagtctctttaaaaacgggtccggt

SEQ ID NO: 1259 - DNA, 735 bp, synthetic construct
  source 1..735: mol_type = other DNA; note = MG160-48_cloned_into_untethered_plasmid
atggccgtggccatccccaatttcgagtatagctacagacgaaagggaaaacctgtgtttgtgccaacagtcattgggagaaggatcgggaaggaggtgaaaagcgaggtggaaagcgcttataactttgatcctatatactatcacctgcgatgcggaggtcacgtcgctgctatgcaccaccatagagactccttgctcttcgcccgcatagatatttctcgctttttctactcaatttcaaggcggcgggttcaatcagcactggacagggtaggcatcgctaacgcaagattctatgctaagtggagcacagttgcaaatccgtatggcaaccccaagtacgcattgccatatgggtttgtgcaatctccaattctggcatctctgaccatcgccacctcccaggtcggcgatcatctgctcggcctgcctgcagctgtgagtgcttctgtgtatatggatgacatatcccttagttccgacgaccggggagaacttgaacgggcctacagcgctactctcgccgttcttgaggccgacggctttcaggtcagtgccgacaaattgagagctcccgccgccgctattgatattttcaactgcgatttgagtcatggaagggcaaatgttcgcgatcagcgcatcgccgaattttacgggcgaggtcctgatcagatctcagaagaggccttcgtagcttactgtgcatccgtagaggacggtaataggccc

SEQ ID NO: 1260 - DNA, 744 bp, synthetic construct
  source 1..744: mol_type = other DNA; note = MG160-230_cloned_into_untethered_plasmid
atgccagtccatattcgaaactttgaatattcctatattaggaataacaagcctatcttcgttcctaccggaattggtagaagaatcggtcaggaaattaaatataaggtggagaaggcccacaaatttgatgacttccagtttcaccttcggcgcggagggcatgttgctgcaatccattcacaccgcgatgggctgttctttgcaaagattgatatagctaatttcttctattccgtttccaggcggcgagtgcaatcagctctggcaaggatcggactcgactcaccgcgcttcttcgcaaagtggtcagctgtcaagaatccctatggccttccagagtttgccatcccctacggcttcgtgcaaagccctatcctggcatctctggtgttttactttagcgagacagctaatttcattcggagcgccattggcgatataaacatcagtgtatacgtagacgacataagtattagttccaaatgtgagatcagcgtggcccaggcctacgcagagatcaacagattgctgcctgaagacggatttcaaatcaatgaccagaagctggccccacccgccgccgatatagtgctctttaactgcgagctcaaaaaccagcttgcagaagtccaggaagccaggattgccaaatttttctctgtggaacggtctcccgctgctgaggaagccttcgccgcttactgcgcaagcgtcgagagagggaatttgaaatctggcgat

SEQ ID NO: 1261 - DNA, 765 bp, synthetic construct
  source 1..765: mol_type = other DNA; note = MG160-379_cloned_into_untethered_plasmid
atgaagcaaacgatcaactggctccacaaatttgaaattaaaaaagaccgatgggtatacatccctaacgctaagaccctgaagtcaggacgcaagatacacaatctgatccgcttcaaatggaagtcccctctctacatgttccatcttcgggacggagggcacgtagcagccgctaaataccatattaagaagaagtatttctcactgattgacatcagtgatttttttggcgcaacaagtcagtctagggtgacaagagccttgggaagactggtgccgtatgtgaaggccagggagattgccaaagagtcaactgtcaagaatttgaacgggaacggcttgaaagacgtcatcccatatggttacccacagtcccccattctggcatcattgtgtctgcatcagtccttctgcgggggcgtgataaataccctgtctaaaagcggcagggtgtctgtgtctatctatatggacgatattcttctgagcagtgacggtctggatcttctcaaaaacgcctttgatgcagttactgaggctcttgtgaagagtggctacacagtaaatgatagaaaaacccaaagccccgctactatggtcagcgttttcaatcttgagctttcccagcacagtctccgagtctctagcgaacggattgtggaatttctcaaggcctatatatcctccaaaaatcctcatgaacggaagggaatcgcttcatacgttgggagcgttaacaaagcacaggccaagatcttcaga

SEQ ID NO: 1262 - DNA, 738 bp, synthetic construct
  source 1..738: mol_type = other DNA; note = MG160-68_cloned_into_untethered_plasmid
atgttggaaaattacgaatgcaagttccagaccaggggaaaaattatcttcgtgcccaacgagaggtctgtcaggaagggcagacgcatcttgaagttcttttcaaaatttgagtttccagattatttttaccactataagtccggcggccacgtggcagctcttcatgctcacctggagaacaaacttttctttaagatcgacattcagaacttctactactctatcgctaggatgagagtgactcgagcactgcggtcatgggggtatcctggcgcaaacacactggctaagtggagctgcgtcgccaatccctatccagggcctaaacatgtcctcccgatagggtttgtccaaagtcctctcctcgcctccctcgtcttgctgaagagtccagtggccgaagctatagagcgggccattaaaaatggagtttgtatttcagtatacctggacgacttcgtgggtagccataacgaccctgctgtacttgaggctgcttacggggatattagagatacatgcgtggccgcacgactggttcccaatcccgctaaacttctcgccccacgcgccgctataactgcctttaattgtgacctgaccgaaggttccatcctggtgacaaccgaaagagttgccaagtattatgccagcaccgctcgcactgtggaaacggatgcagcattcgaggagtaccggtctctcattgccagtgcaaataaagcagccggaatc

SEQ ID NO: 1263 - DNA, 771 bp, synthetic construct
  source 1..771: mol_type = other DNA; note = MG160-234_cloned_into_untethered_plasmid
atgccaccaaccgagaaatggaagagcaagttccagattaagagtaactcttgggtgtttgttcccaacgacgaatcagtgaggtacggtaaggaggtcaaacttactctcgagaagagatggtctgctcctgacttctattaccaccttaaagatggcggacacgtgaaagccctcaaatcccataccggccatcagttttttattcacctcgacataaaagattttttcggttcaatcaatcgatcccggatcacaagatgcctgaaaagatacttcggatatacaagcgcacgggaaatcgcagagaagtccacagtgatgctgcccaataatgccgtcaagaagtatatactgccatttggattcgtacagtcccctattatcgccagtatttgcttggacaagtctgggctgaaccagtgtctgtacaggttgagtaagacccctgatattgccgttagcgtatatgtggatgatattatcatcagcgggaacaatctcctgttcctgagccaaaaactgtccgatataaagaacgcagctatcaagtcaggctttgcccttaatccggagaaggaagagggccctagtgataaaattacggcttttaacatcgaactgagtcatagggaattgaaacttatagactcacgcttcaatgagtttttcgacgaatacaaatcaagcgcaaaccccaatcagcgcaaaggaattatcgggtatatctcttctgtcaattccactcaggctgacgacttgcaaaagctc

SEQ ID NO: 1264 - DNA, 753 bp, synthetic construct
  source 1..753: mol_type = other DNA; note = MG160-395_cloned_into_untethered_plasmid
atgacccaaaagtggactcactgctaccagttgaagcccagccgatgggtttttgcccctactgatgaagcccgcaagacaggacagagaattaaaggtgccgttgaggcacactggcggcctcctcatttctacttccaccttagaaaaggaggccatgtggcagccgtgcggtcacatatgccttccaaattttttttccgagctgacatagacgatttctttggccgcgtgagcaggagtaggattaccaggtgtctgaaatcttggttctcatatgctgatgctagagagatggccagcgaaagcgtagttaagaggcccgggctcgaaggcttcgtacttccatatgggtttgtgcagagcccaattctggcctccttggctctggagaaatcagctttgggggcatacttgaggaaacttagctcccggggagacctccgggtttccgtctatgtcgatgacataatcatcagtggagataatgaatccgtcctgggcgaagtcggcgagaggctcatcgacctggcaagtaaggccctctttcccgtgtctcgggaaaagagagagggtccggccgaggaggtgacagcattcaacattcgcgtgtcacgcgctgccctgagaatcacggacgagagaatggctgaactgcgactgtcttaccagtctgctacctccgagtttagtcgcgcaggaatccttgggtatgtagacagtgtgtctccagcacaagccgattcattgaga

SEQ ID NO: 1265 - DNA, 771 bp, synthetic construct
  source 1..771: mol_type = other DNA; note = MG160-9_cloned_into_tethered_plasmid
atggacagatggattaatcggtttaaactgaaccatagcatctgggtctttgtgcccagcgacgattcaaggcaggtgggacggaagattaagaccgcaatagagaaaaattataaattcccagagttttacttccacctcaagaatgggagtcacatcaaggccctgaacagtcacatgcaacatgaatactttgcctctctcgacattgaaaatttctttggaaatatcaataagtctaggattacacgcgttcttaaaatatttttctcctacgatgaagcacgagagtacgccaactggtccgtcgtgagaaaccctgacgaaaactccaacgagagcattcttcctttcggctttgtacagtcacctgctttggcatctctgtgcctcgataagagtaagctgggccgagtgctgcgcaacatcaataatctcgatgtgtcagtatccgtctatatggatgacattatactgagcagcaatgacaaggctctcctttataagtcactcaaaaaagttgaagaggccagtgagaaaagcaagttcccattgaataaggataaaaaaaacaatccctctaacaaggttacagtgttcaacatcgatctgtccagagggaaacttcagattaacaacaagaggatcaaagagtttcagtctgcttatgaaaagaccggcctggacgaagagaaaaaaggtattttgaactacatcaaaactatcaatccgattcaggagaagcaattcatcgacaagatcaataagata

SEQ ID NO: 1266 - DNA, 753 bp, synthetic construct
  source 1..753: mol_type = other DNA; note = MG160-70_cloned_into_tethered_plasmid
atgaatcccaagtggagcagcaagtttgaacttaaacctgggagatgggtattcgtaccaacccctgcatccaccgccaccggggaatggataaaagcccagatcgaggctcattggactccccctgattattattaccaccttagatcaggaggtcatgttgccgcactgaaatcccacataggccacacaaacttcctccacctggacgttcaggactttttcggcagcgtgaataagactcgggtgacacgatgtttgaaaaccaaagttggctacgctctggcccgcgaatgggccaatgcctctacagttactcatccaaagaataagaacagatcaattattccttacggattcgtgcagtctccaattatcgccgctctctgcttggctgagagtgctctgggtatttctctggcaaagatcaggaaaaaaaagggggccgtcgtgtctgtctatgtagacgatataatcgtgtcctccaacgatagttcactctgccttagcctgctggcaatgctcaagacggcagccgacagggcacgctttacactgaatccggaaaaagagcgaggacccgcatctcaggtcactgccttcaatatcgtgctgtccagcagttcaatgcagatcgagtcagctcggttgcaagagtttgtggaggctctcgccaaggcaagtaaccaagcccagaggatgggaattttgtcctacgtgagtagcgtcaacgctgaacaaggcaacgctctt

SEQ ID NO: 1267 - DNA, 756 bp, synthetic construct
  source 1..756: mol_type = other DNA; note = MG160-255_cloned_into_tethered_plasmid
atggccaggtctttcgaaaaattctacgagattaaggaggggcgcttcgtctttgagcccactactaaggcaagaaagataggggaggagatccttaatgacctgttcaaaatttggtctcctcctgatcacttttatcacctgggcaagagcaaaggtcatgtggaggctcttagggtatactcaaagagtcggctgtttgcttcaatcgatatagaaaatttcttcggatctgtcacacgaaccaaaatatccagaagccttcgcgctattggaatcgacgacaaaaaaggatttagtattgcttacgattccgtggtggactttggcggcacgaagactttgccctatgatttcatccaatctgtcgccctcgccaccctcgtgatggaattttcagcattgggcaacgccatccgacaggccatcaagagtaacgtgatgattaccgtttacgtagacgatattatcctgagcggggaacacgccgagacactgcagcatcatttcgatgaatttgtgcggaccacaaacgctgccaagttcaacatctccgcaaaaaaatgtcagaatgttagtgacaaaatcgaagtctttaattgcaatttgtctaagtcccacatttccacaaacccaaaaagaatggcacaatttaaggtggactatgcacacgccagcgatgctaggagagcttcaatagaaaagtatattactgcagttaataagagccaggtggccgagctcggtcggctgcat

SEQ ID NO: 1268 - DNA, 777 bp, synthetic construct
  source 1..777: mol_type = other DNA; note = MG160-260_cloned_into_tethered_plasmid
atgaagaattatgtctctaagatccccctcggcgacggaaaatttgcctttcaccaagatcctacgtttcagcgccttgggctggacctgactgaaaagatcctccaaaactggaaggcccctaatatattctatcatatgcgcaatggtgggcacattgctgctctgcataagcaccttgaggggcagtacttcagtcacttcgacatacggaggtttttctaccagatcactaaaaacaagatcatcagatccctcaagaggatcggattttcctacgacaaagccattgacgcagcctcccattcagttgtccacgtcgataacacttactttctgccctatggcttcacccagagcccaatcctggcatctctgtgtcttttccattctggagctggccggtatctcatgagactcccaaaaaccgtgttggtgtccgtatacgtagatgatataattctgagcgccacatctaaagacgagctctctcaggtgtcagaggaggcagcccagtggttcgaagcaagtcagtttccgttcgctcctgataaaaccgaagtgtgccaaagcgctattacctcatttaatgttgaactgtcccatggccacacacagattacagacgataggatgcgagcttttaaaagacaggtgactgaaaatatttataacaagggaagtttgcaaggtatacagaattacattagttcaatcaacacagagcaaagcgatgagatcagcgcctatattgaagggttgttcaagggccaggca

SEQ ID NO: 1269 - DNA, 762 bp, synthetic construct
  source 1..762: mol_type = other DNA; note = MG160-424_cloned_into_tethered_plasmid
atgtatgatatgaaccagaggtggaaacataagttcgagatcaaacctggaaaatgggtccacgtgccggctgacggagaaattgagtacggtaccaaactgaacaaacaactgcagaagcgattcccttttcctaatctgtattggcacttgaagtgtggaggtcatgtaaaagctctgaacgaacacaccgaatccaagtacttcgcctcccttgatcttggcgggtttttcacaagtatcacccggaatcgagttactagatcactcaagggcagatattcatatcagcaagctcgggacattgcaacacgcagtactgtctggacacccgatcagaataaatacgtcctgccatttggctttgtgcaatccacattgctcgccactatatgcctgaatcagtcaaccctggggtctgtgctgcaggcaatcagtaacacgccaaacctcgcagtgagcgtttacgtagacgatataatcgtgagcggattgacgattggctctgtgctctccgcatttgatcgcttgaagctggccgttactaggagtaacttcaacatcaataatgacaaacttcaggaggtgtctgaaagcatcgaggcctttaacattaggctcacccataatgagctccttataactgacaagagaatgatccagttccaggacgcctacgccagcgctacctcaaagtattctcaggaagggattctgacatacattagctccgtcaatcccctccaatctaatcttatgaag

SEQ ID NO: 1270 - DNA, 768 bp, synthetic construct
  source 1..768: mol_type = other DNA; note = MG160-21_cloned_into_tethered_plasmid
atgccttcccacaaaaggtggaacagtaaatttcagattaaggagggagtgtggctctttgtacctaccgaagacaccatcaacaacgggctgctgatcaagaaacttattgaggccaactggagggcccctgaacattactttcacctgaaatcagggggccacataaaagccctgcatacccacttgcacaataaatatttcattcacctggacatacagaattttttcggccagatcaacaaaagccgggtaacgcgatcactgaaagagcatgtcccctatgaacaggctagaaagattgcagtggaatccactgtgagattgccagagagtacccctgttaagttcatgctgcccttcggcttcgttcaaagccccatcatcgcatcagtgtgcctgagcaagagcgctctgggacggcatctcgcaaatctcgtcaagcaggaaaattttgctgtctccgtgtatatggacgatatattgatctcttcaaataatttggaagagcttaatatacaaatggatctgattaagacagccagtgagaagtccggtttgccgttgaacgagaagaagcaggaggggccatgtgtgaatgtgacagctttcaacatttgcatctcccagggacttctcaaactcatcccaagcaagctgcaagagtttattaatacatactctaactctactaacgaacatcagcgcgccggtatccttaactacgttctttctgtgaatgaagatcaggcaagtttggtcgccctc

SEQ ID NO: 1271 - DNA, 759 bp, synthetic construct
  source 1..759: mol_type = other DNA; note = MG160-419_cloned_into_tethered_plasmid
atgtcccacatcaattatgagtacagatatgagatcaagcccggccgattcgtgtatgtccaaaccagatctagcgcaatctctgggagagctattatcaaacaggtgagccgaaaatacaagccctctcggattttttaccattttcgccgcatgggaggacatgttgctgcactgaggcttcaccaggggagcctctttttttcacggttcgatatagaaaacttctttggacaggttgccagaagccggatagcccgctccttgagacaagtgggtatagctcatagacgcgcattcaatatcgctgtggagtcagtcgttgtggaaggggctaataaggtactcccattcggcttttgccagagtccagtcctggccaccgtagccctggagttttctatgcttggctcaacccttaagaggctgagtgctgcaggcttccgagttagtgtgtacgtagacgatataattatcagcggaaacgaccaggcagccctccatgcagcttcactcgaattgattgacgccgcatccttgagcaagttcccgctctccacatccaaaaggactattgccgcctccgccgtggaagccttcaactgccagatcgattcacacacgattacaatcctggacgataggatggacaggtttgtgtctgaccaccgggattgtactccttgggctcaaggtgcaatcgaaaaatatgtcaacgctattagtcctgccgagctggtgcggctgaatagtctgttg

SEQ ID NO: 1272 - DNA, 765 bp, synthetic construct
  source 1..765: mol_type = other DNA; note = MG160-20_cloned_into_untethered_plasmid
atggtgccaaaatggagcagcaaattcgagctgaaactcggcacagggaaatgggtgtttgtgcctactgaagagtctaaggagacaggagctaagatcaaagccgctatacaggaatgttggagtccaccgtcatactactaccacctccgcagcggcggccatgtcgaagccgttaagtcccacctgggccacacgaccttcctccatgtggatattcaggacttttttgggtccattaatcgatctagggtgacaagaaacctgaaagctaaattctcatacgaagttgctagagaaatcgctaacgcatccaccgtgaggcaccccgatgacaaggccagatatatcattccttatggtttcgtgcaaagccagatagtagcagcactgtgccttgaccagagtcgccttgggacctacttggataagctgtgtaagcagaaggatgtagcattgagtgtttatgttgacgatattatcgtgtcttgcaatgatgcagatcaggccaatgccatgctggccggtcttattgccgctgctgaatcatctggatttaccctcaatcccgacaagcaagaggggcctgctgcagagatcactgccttcaatattctggtcgcaaacgactccatggctatcgacggaaaccggttcgccaagtttgtcgaggcccttgccgctactagcagtgagcatcaacgggccggaatattgagctatgtcaaatctgtgaacgtagaccagtccgattcactggtcgca

SEQ ID NO: 1273 - DNA, 774 bp, synthetic construct
  source 1..774: mol_type = other DNA; note = MG160-73_cloned_into_untethered_plasmid
atggtcatcaattaccataagaagatttttctgggcaacagcaagtatgcctatgagcagacagaagatttctacaaccggggcctcatcattatagagaaaattctgaaattgtggactcccccttcttattactttcactatcagaagggcggacatcttgcagccctgaaggcccacgaggcaagtaattttttcacgagaattgacctgagccgattctactatagagtgacaaagaataaaataattaggagtctggtgaaagccgggttcagctttaaagaggctaacgaaattgccatcgagtcagttgtgaaaaccgctgaagggtactgccttccttacggatttgttcagtcatccctcatcagttcactcgtcctgtccttctccggtcttgggggagcactccgatacgaagcaaactcttttaacgtgtccgtgtatgtagacgacatcttgatcagccagaaaggtaaattgagcgaaattcggaacttctccgaaaccgtttgcatcgctgcagctcattcaaattttcccatcaatctcgagaagactgagatcggcaagaccgagatcgaaatcttcaatatagatctggctcaaaattctaagtctatatgtgataagaggcttggagagttcctggtggaagtcaaatctagtgactcagatgagcgcgccaacagcatgattgcctatgtcaggcaagtaaatgtgattcagagtaacttgctgtatcgcgctagatacgggcacataccaaat

SEQ ID NO: 1274 - DNA, 747 bp, synthetic construct
  source 1..747: mol_type = other DNA; note = MG160-99_cloned_into_untethered_plasmid
atgccggttcaattcgaaaattatactcactcatttgagctgaaaggcaagccagtctttgcaccttccgagcgggggagaaggatcggaaacgacattaaactgaaagtggaagcagctgctaatttcgacgccttctatcatcatttgcagcctggtggccacgtcgccgctctccatgctcatcgagataatcgatacttcgcaagggttgacatcgagcgattcttctacggcataggccgcaacagagtagcacgggccataagagaatctgggattaggcgcgctgcccactacgccaagtggtcttgcgtgaaaaatccttacggcgaccccagctattcactcccatatggatttatccagagcccatgcttggcaaccttggtgcttatgctttcacccgtgggagtttttctgcggagccttagccgcgagctgactgtcagtgtgtacatggacgatatttccttgagcgccgctgatcaagctcggctgatgacagcatatgaggagctgaccgcttgtatgcagcactccgggttcgcactcaacgccgctaagtgcagacctccagccgtggcacttgatgtttttaattgttccctcacgggtggactgacccaggtgctggaagatagggtagctaagttttttagtgtggccaggacagccccctctgaagccagtttcatgagatactgtgctgccgtcgaagccgggaacgcagctctccccaagtct

SEQ ID NO: 1275 - DNA, 768 bp, synthetic construct
  source 1..768: mol_type = other DNA; note = MG160-263_cloned_into_untethered_plasmid
atgccgaaaaatgcccggtggtccagcaaatttgaaatcaagagtggcagctgggtcttcgtacctactgatgaaacagtggaatatggacagaacgtgaagaaggcaatcgaggataggtggctgcccccatcattctactaccatctgcgagacggcgggcacgtccaggctctttcttcacacacaaataacgacttcttcatccatctggatatttctaacttttttggttgtatcaacaagagtcgcgtcactaggtgcctcaagggcttgtatagttacaatcaggctagagaaatcgcagttgagagtaccgtacgcgacccaaataaccccggtatagagaagtatattctcccatttgggttcgttcagtcccccattattgcatctctctgcctgcaacagtccaggttggggagatacttgtccgacctgaataacatggacgcatacaaagttagcgtgtacatggacgatatagtagtgagctctaattcagacgctggtcttagcaatgtcttgagagaggtgaaacctattgctgagaaagccggattccctctcaatgaggccaaggaagagggacctgccggcaagattactgcctttaatatcgagctttctaaaggggttctgaccctgacggaagagcggctgcaagatttcattgccgcatatcgggaatcagataactttaacgtcatctccggcatagtgggatatgtgacaaccgtgaacaagggacaggctgccaaaatcgtg

SEQ ID NO: 1276 - DNA, 777 bp, synthetic construct
  source 1..777: mol_type = other DNA; note = MG160-433_cloned_into_untethered_plasmid
atgaaaaactattcttctaagattcctctgggagcagataagttcgcctacgaacaggtgccttccttcaagctcctcggcgaggccttttcctctcgcatttacgtcgcttggcagccaccctccatcttttaccatcaccggaacgggggccatattgctgtgctcgacaagcatctccagtcagatacattttcacgattcgacatcagcccgttttttaatagagttaccaagaacaagatcatcaaagctctgaaaacatgtggttttagcctgatcgaggctagtgaaccaactgcccacagcgtcgtgaagactgaggccagattccaccttccctatgggtttacgcagtcacccgccttggccagcctgtgcttgaatcagagccaagctggcaaattccttggtaagctggataatgcaatactggtctcagtgtatgtggatgacataatcctttctcacaaaaatgaccccattaagttgagaaaagtaagtaaatccttgattgagacattcacttctgtcgggtctcctattagtgaaacccggtccgttatcgctcaaccaaccataaccgcattcaacatagagctgcacaataactcaatggccctgacacctgaacgcctgatcggattccataaccaggtgatcgccggatggcagtccgacgacgtgctcgtgggcattcataattacgtacttagcgttgatgcagcccaaggagcagaaatcgagcacgcaattagtaggatgcagagtaggagg

SEQ ID NO: 1277 - DNA, 771 bp, synthetic construct
  source 1..771: mol_type = other DNA; note = MG160-36_cloned_into_untethered_plasmid
atgctggaaaactacgaccaccgctacactgacgacggcggacggctcatctttgtacccacggatgacggtagacttattgggtatgatctgattcgacggatactgaagagatggcggccccctgccttttgctaccattttcagcgcggcggccacgtggcagccgccgaggcacacttgccaaataggctcttcgtgagaatggatattcagcggttctatgacgctgtgtctcgcaataaagtgcataggagtctgaagtctattggcatcaaacagcggcacgcttgggaggcagctaggtttgccacagttagccgatcacccagtggacgaggcaggccatacagtctgcctttcggattcgttcaatcccctatgcttgctacagtggctctgatgacctcagccttgggaaatgctatcgccgccgtccatgctgcaagagccataactgtttctgtgtatatggatgatgtattgctgtcaggggaatgtgcctccgtcttggcaaacgccaaaacgtttctggaggctgccgccgcagaaagcgggttcacctttaatccggagaaggggtctggtccaacccctagcgtaacagtgttcaacctcgtgatccaacatagatccatggttcttaccacagatcgctttacagatttcgaggacgacatcagaaagtccaggaatgaagacatcactaacggtattctcagctatgtcggaaccgtgaacgtcgctcaggcaactgcactcgctaggctt

SEQ ID NO: 1278 - DNA, 762 bp, synthetic construct
  source 1..762: mol_type = other DNA; note = MG160-107_cloned_into_untethered_plasmid
atggcattccatgaattgtgggaggacagatttgagctggcccccggaaagtgggtgtttgtcccatcttccgaatctcggcagaggggcgaacatattgtgtctcggatcaaggaaaaatggcaggcaccggcatacttttatcactgccatcacggcgggcacgttcgagctgttaaaaaacatctggctaacacatactttttccgcgtcgatattgagtcattcttcacgagcattaatctcagtcgggtcacccgcgtgcttaaaaagtattttggatacgaagtggctagagagtttgcaagagacagtgtggttcgggtggctggggacgtagatttccagtatatcctgccctttggattcgtgcagtccccaattatcgctagtctgtgtctggatcagagtgcccttggcagggcactgtatgaactggcctcacgccctgatataacagtatcagtgtacgtcgatgacatcatcatttccggaaatagtcttcactcattgcaaaaggaatttgagataattaaagagaatactggcaagagcgggtggaacctcggtgcctctaagacccagactccaagcgacagaatcctcgccttcaatataaacctctcccaagggagcatcgcaatctcacctgagaggatgagctccttcttcgaggcctatcaccagagcgcttctccccaccagaaagagggtattctgaggtacatacgatccatcaaccctgctcaagccgccgccttg

SEQ ID NO: 1279 - DNA, 768 bp, synthetic construct
  source 1..768: mol_type = other DNA; note = MG160-279_cloned_into_untethered_plasmid
atgcacgaatccttcgagagtaggtggatcagcaggtttgaaattaaaccgaatgcatgggtgtttgtccctaccagtgaatttatccggtacggtaccgagattaaacagactgtggccaaacgctggcactctcctagatactattaccacctcagggatggcggccatgtttctgctcttaagaagcacataaaacataaacacttcatacacctggacattcaaaatttcttcggtcagattaacagatcccgggccactcgctgcctgaaggactatttctcctactccgaggcacgaaaaatagccatcaagagtaccgtggctctgccaagatcagctatcaagaagtatatcttgcctttcggctttgtccagtccgccattatcgcttctctttgccttcataaaagcacgctggggaaacatctgcatcagctggcaaagaaatcagatctgacagtttcagtatatatggacgacatcatcatctctagcaataaccagcaccaactcgaagaagtattggtcagcgtggaagtggccgcagagaaggctggatttccactgaataaaacaaagcaggagggaccctgtgatcagattacagcatttaacatcctgctcactgaaaatgagttgaagattaccgatgagcgactcgatgagtttattgaggcctacaaggccagtacaaaccccaaccagaaggacgggatattcaattatattaactgtatcaatagcaaccaagtgtcattcctc

SEQ ID NO: 1280 - DNA, 930 bp, synthetic construct
  source 1..930: mol_type = other DNA; note = MG155-3_cloned_into_untethered_plasmid
atggagcttattaataaacttgctactaagctgaacaagtcagaatctgaggtcattcgatttttggcctccgctccattgaaatataaagtttacacaatccctaagaggacaagcgggcacagggtgattgcccagccatcccgggagctcaaagagtaccaacgcgcatttatctctctgtacagattgaacattcacgacgctgccatggcctatcgcgaacggctgagtattaaggacaacgcaaaatttcactgcaagaatagatatttgctgaaaatcgatctggagagtttcttcaatagcatcacatccgaattgttctggacaatctggcagcagcattacgaaatgccgaataacgatgagaaggtgctgatggagagactcctcttttggagtcccgggaaaagctcaactggaaagttggtactcagcataggagctcccagttcacctctcctttcaaatttcttcatgtaccagttcgatgagcttgtgacacgacattgtgaaaaacttgagattaaatatacaagatatgcagatgacctgaccttttccaccaacgccaagaacgtgctgtttgatatgccccgctatataagtgacactctgaccaccctttttggctccgctctgatcatcaataggaggaagactgcatttagctctcgggcccacaaccggcatgttacgggtattactattgataatgaatcagacttgtctctgggcagagagaagaaaaggtacatcaagcatctcgtccatcaatatcgacttaataagctggacaaggagaacgtcttccacctcaaaggcttgctggcatttgctaaacacatcgagcctaaattcataaccagcctggaaacgaagtactctgccgaagtgatcacccagatattcgaagaacagcacggt

SEQ ID NO: 1281 - DNA, 924 bp, synthetic construct
  source 1..924: mol_type = other DNA; note = MG155-4_cloned_into_untethered_plasmid
atgctggtcatcaacgatcttggaaagcgccttaatcagtccgaccttgccgtgaaagcctttctcgaaaatgctccacggaagtacaaggtgtataggattccgaagcgcactacagggttccgaattatcgcccaacctgccaaggaactgaaagcctatcagagggcatttatagaactgttccattttcccgtgcacgagtgcgcaacggcatatcaggagggtaaatcaatcagagataatgcactcgttcacgctaggaacccctacctgctcaaaactgatctggaggatttcttcaactccttgactccagacatattctggcagtgcatagaacattgcagcgctgacgccccagaatttcttaaagaagagcggaggtatgtcgagagactgctgttttggcagcctgccaagcgaagcaaaaggcttatcttgagcgttggtgctcccagctcacctgtgatttctaacttctgtctcctcgagctggatcgcagaatcagtgaggaatgtcgccacctggaagtagattacacccggtacgctgacgacttgaccttctctacaagaatcccaggcgtgctcagtgctatccccgccttgattgactcccttcttaaacagctgtacaattccaagctcagattgaatcggggcaagaccctgttttcttcacgagcacacaaccggcacgtaaccggagtcacactcaataatgaaggagagctgtctctcgggagagaacgcaagaggttcataaagcacctgatccatcagtatgatacattggacaaagaggataaagcctacctggtgggcttgctggcttttgcaagtcatattgagcctgagtttattatccgaatgaacgctaagtatactaccgagctcatggacagaattaggcggcaacaa

SEQ ID NO: 1282 - DNA, 939 bp, synthetic construct
  source 1..939: mol_type = other DNA; note = MG155-5_cloned_into_untethered_plasmid
gtggtaggactgttggcttcaaaacttgatgataagccctctccaaaggtggtggaggccttcctgagagacgctgcccgcaagtactgtgtatttaagatccccaagcgcacgcagggattccgagtcattgcacagccaagccgagagcttcagcggtaccagcgaacttttcttgacaattttagtcttccggtccacagtgcagcaatggcatataggaagggccaatctattaaagaaaacgctgaagctcatctgaaacagaagttcctgctgagaatggaccttgagaatttcttcaactccataaaacctgccctgttctgtagcgtgtggcagtccttcgccgacctcccatctctggacgagactgatgtgggcctgataaaccagctcttgttttggtgccctagccaacggaggggtgggaaactggtgctgtccgtcggtgcccctacctctcctatggttagtaatttctgcctgtatcattttgatcaggccctgacagaattttgcgataccgaacgcatcgtttatacccgctatgctgatgacctcacatttagcacaaatatgccaaacgtcttggaaaagatccccaaacaggtacaaaagttgttgaaagagaaattgaccggaaagaattaccaactcagggttaacagaattaagaccgtgttttcctcaaaaaggtacaatcggcacgtgacagggattactcttgcaagcactggcaaactgtcaatcggccgggagagaaagagatacattaagcaccttgtccatcagttcaagatgggagagctcgagaaggtggaagacatcgcccatctcaaagggctctgggctttcgccaaacacatcgagcccgagttttgtagagcacttgaaaggaagtatgggctcgttacaatgcagcggataaaagaagcc

SEQ ID NO: 1283 - DNA, 957 bp, synthetic construct
  source 1..957: mol_type = other DNA; note = MG156-1_cloned_into_untethered_plasmid
atgtggcggtactgcaccgacgaagaggcaatcaggagcttccatctcacagacggccttcagtgtaaggaggggaaggagattcagactctgtttgccgtgagcaatcatgctgaggtgcactaccacaccgcatacattccgaagaaaaagggcggcagaagaaagttgctggtccctgatgctctgctcggaagaatccaaaagaatatcctgcaaaacgtcctcgcagaacggaaagtttcaccatatgcaaaggcctacataaagggcatgggaatcgtggaaaacgcccttccacactcacatgctgagattctcctcaagttggacatcgaggattttttcgaaaacatcacatatctgatggtatatcagaaggcctttcccgaaaaatattttcctcccgctatccgaactatgttggcacacctgtgttgctacaacgactaccttccccaaggtgctgtcacatccccaatgatttccaatttggtgatgtacagtttcgatgagtatattgggaaatggtgcggtgaacgcaaaatcgcctacacacgctattctgacgatatgactttctctggtgacttcgaagttaaagaggtaaagcataaagttcggtcttttctgggcaaaatggggttcctgctgaatgaggaaaaaaccagggtgcttaagcagtatcagagacagattgtcaccggaatcgtggtgaatgaagggacgaatatatcaaaaagttataagcgcagcattaggcaggaaatctactattgtgaaaaatatggagccaagagtcacctgcagaggcgaaatctgtccgagaaggaggaggttccctacctcaaacagctgcttggaaaggtgaactacgtattgcaaataaaccctgatgataaaaactttcaggaggccaaaaagaagataaaagagatgctcctcaaaattaagggc

SEQ ID NO: 1284 - DNA, 999 bp, synthetic construct
  source 1..999: mol_type = other DNA; note = MG156-2_cloned_into_untethered_plasmid
atgatctcaaccggcctgtggaagtattttaccaaagagcaccacaaggagtttgtgttgtccttgggactgctgaacgacacgggctggcccattgagaaacagctgagatgcctgtatacagttagtaatcatactgaaaggcattacactaggttgactgtacctaaacgcgatgggacaattagggagctcctgtctcctgacccccttcttaagaaaatacagagaaatattctgcacaacgtgttggaagaactgcccgtcagccctcatgccaccgcttatcggcggggcgccggtatcctcggaaacgctttcccacaccaaggtcggaaacaagtggttaagctcgatataagagacttttacgggagcattactttcctcatggtgcatagagccttcccacggatctactatccacctagcgttgcaaccctgttgacccatctgtgttgctaccaggactgtcttccgcaaggagctcctacttcccccacaatatccaatctcgttatgaaaccctttgatgatcacatgggaacatggtgcaaagagcggggcatcatttatacgcgatactgtgatgacatgacattctctggtgattttgacgccgaaccgctgatacgcaaagtacgatccttccttctgagcatggggttcgagctgaacgagcgcaagacacagatcttgtgcggagggaagagacaatcagtgaccgggatcgtagtgaatgagaagcctcaggtctcacgcgtctatagggacaagctgcgacaggaactctactattgtcagaagcacggcgtggcaagtcaccttctgtggttgaatgataggcagtatctcccaccagaaccagagcagattgagagatacttgagatctttgatcggtaggattaactacgtgctgcaggtcgatccccttaatctctactttgccgaagcacggaccactatcggcaacatgatcaaggacatggaaagtgga

SEQ ID NO: 1285 - DNA, 1065 bp, synthetic construct
  source 1..1065: mol_type = other DNA; note = MG157-5_cloned_into_untethered_plasmid
atgaataatattaagacaaaaacaaattactttctcctgaacaccctggggctgcctatcatcgactctctggatagtctgtccgatactcttgcaatttccaaaaatatgatttatctcctctctaaatgcaactacaattattacgtgaagactcatatacccaagaaagatgggaccaagcgggaaatactcatccctaattacagcatgaaaatgacccagcgctggatactgcagaacatcctttacaaaattcgggtgagcgataatgccaaagggtataagaaaggcatcaaggccccgctggttgagaacgccatgatgcaccacgagcaactctattgcctcatcttggacgtggagaacttcttcccaagtatcggcgtgaagcggatttgcaatctgtttgagagggtcggttataattccttgatcagctacatccttgctcgcatatgcacatataaagactacctcccccaaggcgcagttacaagtccctaccttgctaaccttgtgtgttttaagctggaccgacggattgatgcttactgttgtaaaagggaaatcagctatacgaggtactgcgacgacctgattttttcctctgataatctcgattctctcaagaaagcctacaagatgttcgaagttattctttgtaacgaaggattcaaactcaatcgcagaaagactagattcttgacccctaacaccttgaaacagatactgggtattactatcaatgacgagttgattaaagctcctaaaattatgaagagaaaagtgaaggctctgatctttaagtcaatcgtcaacaaggactatcgaaagaatgatgtaatcaggggatatatcgcctacatcaaaagcattgaaaacaactatcagaataaaattgagaagtacgtcaagagactgcataacaaggactttataagaggagatctcgaagtggtaaaggcctataacgagaataagctgtattcaaactttccagaccttgccttctcaaaagcagcagcactgttcctcgagaacccagaactggaagagttgatg

SEQ ID NO: 1286 - DNA, 1413 bp, synthetic construct
  source 1..1413: mol_type = other DNA; note = MG159-1_cloned_into_untethered_plasmid
atggcaactgatactttggcttgggctgatgtggatgccgccggaggcatacgcgcctgggtggatgccgaggtggcccgacagggcttggcagatccaggagctacacagtctacgagcgaggcaaaatccaggggtgtcgggaccccgaccgcctcaccggctggccggggtagctctcccgttgagaaaatgagcgacgctgaactgaagctgtataaggcaaggcgagatgaggaaagacgggtgaggcgagaactttacaggagagcatggcaagcctataggcgcagtcacattgtgcacttgggccccggtgtgttctggcatgacacagccgacgtggacagatttgacgccgatgacccagagcggaagcgacaagacaatgctttgcctgctctcgctgatgtcgaggctctggccaaggctctcggactcactattgcaagactccgctggcttgcatatcaccgagacgtagacacaggcacccattaccatagatggttggttcctaagcgcgacggcaccccacggctgatttccgctcctaaacccgaacttaaggcagcacaacggtggataatgagagaggtcacagaacatctgcctatgcatggagccgctcacggatttattccaggacgctcaatcgcctccaacgctgttgtccacgccggggccagagtggtagtaaaactggacattagaggcttctaccctacagtaactatgcggagagtgaagggcctcttgcgacgggccggtctcggtgaacaagttgctactgtgatggcacttttggctaccgagtccccacgcgagaaggtcgaaacccacgggaagactcactatgttgccctggggcctcgaagtctgccccagggggcacctaccagcccttcaatcacgaacgctctctgcctgaggctggattgcagactttcaggcctggcaaggaaacttgactgtagatacactcgatacgctgatgatttgacgttcagttggcatggggcagcccgggctcagatcggaagcctcctgcgagccgtcgggaaaatagtgcgcgctgaaggctttgaagtccacatgaaaaaaacacgcgtgatgagagccggggcaaggcagaaagtgactgggctgatcgtgaatcaggctccacccgaccgccctgcagcccgggttcccagagacacacagcggaagttgagagctgccattaggaatagggagctgggccgcccaggaaaaggcgaaacactggatcagctcaagggtatggccgcatttgttatgatgaccgatcccgccaggggtagggctttcatggaacggatcgagaggcttatcgccgcaggaacacagggagctgatggagcccccggcaccccggagcgggggtctcca

SEQ ID NO: 1287 - DNA, 1533 bp, synthetic construct
  source 1..1533: mol_type = other DNA; note = MG159-2_cloned_into_untethered_plasmid
atgtctgatcagacgagcacaacagagccagcaccctccgctgatacaccgtcagcactcgccagcgccgacggccagccatccggggctgaagcctgggctgagatcgatgaggccggcggtattagggcctgggtgcaagccgagctgaccaggaggggcctcatcgacgacgcagatactacaagtatgtcagacaaagaacgcaagagatatagagctagacgcgatgaagaaagaagagtgcggcggctgttggaagcacgggcttgggcagcctaccgacaggcccatcttgtccacgtcggcctgggggtgttttggcacgataccgccgattacgaccgatacgacattgccgaacctgaagtaagaaggcaagacaatgatcttccagcactggcagacgtacaggctctcgcccgggctctcgcccttcctatcccgagacttcggtggctggtctaccaccgagaggttgattcaggcactcattatcatcgatggacagtccccaaacgctcaggaggcgagcgattgatctctgcacctaaacctactctcaagagagctcagacgtggattgcacgcaatataacggaacatcttcctgttcacggcgctgcacacggtttcctccccggtaggtccactgctaccaacgctgccgcccacgctggggctgctgtggtggtgaagttggatctgagagatttttatccatccatcaccctgcccagagtgaagggagttttccgaaaagccggatatggagaacaggtcgccactgctcttgcattgctctgcaccgagtctccacgggaagagatggttgtgcatggacgccgataccacgtcgctgtgggcagcaggtctcttcctcaaggagctccgactagcccatccataacaaatgcactgtcactcaaattggactgtaggctggatgggttggcacggaagctgggtttccggtatacacgctacgctgatgaccttactttttcctggcaccaggacgaagacgctccagttggtcgcttgatccgggccgtggagcgcataaccgccgaggaggggtttgcagtgcatgaaaaaaagaccaggattatgagggctggccgccgccagaaagttaccggactggtggtgaaccggctgccaagaagacccagcgggcaggccagtgacgagagtcggggacagcccagtgaggaacctctgggacatggtgcttctggacaagagccaggggtaggggcaccccgcgccagggtccctagaaagctggtacgacacctgagggccgctattcataacagggcacagggaaagcccggccagggggagacacttgcacaactgcggggctgggctgcatatgtgcacatgaccgaccccgccagaggtagagctttcctcgaccagcttgataggcttgcctctgccggagttggcgacgaaaccggcgccggggctggcgatgaggccagtgccgggactagcgatctgcctgccacaggcgacaagagc

SEQ ID NO: 1288 - DNA, 1899 bp, synthetic construct
  source 1..1899: mol_type = other DNA; note = MG159-3_cloned_into_untethered_plasmid
atgtcagatcaagctcgacgagctgcaatccaagctaggattgcccagtcctcccgcgacgatgttattctcgacgaaatgattcgactggggttctgggatgccggaggtgacccacacgcagccgagcttactgagatcatggcccgaagcaaagaaatcagaagtgagcttagtcagcttaatagccagaatgcacgatacctcgacccggaggccgctctgaaggcaatgcacgctgaacggaaagcagccgccctggcccgccggaaggagacaaaacttgccagggcccgcgcccggcaggctcgagcagaagcctgggcccaacggtccagggatgctgtgtggcatctgggtcccggagtgagcgctgcacttgaacagggcgagggtaaatccgctccaagatctcttgctcctggtcttcccgccttggccactcctgcagctgtcgcatcagctatgggggtaagcacaggagaactccggttcttggcttatgcaagacccatgagtcgggtgagccactacaagcgctttgagataaccaagaagtctggcggcaaacgagttataagcgctccaatgccccgactgaagtatgcacagtactggttgctggatgctgtgctgtcaaagctgcctctccaccctgccgcccatgggtttgtccctggcagaagcattctgaccaacgctcgacctcatgtaggacgagacgtcgtggcaaacatggacctgcgcgacttttttcccaccctggatgacaggagggttaagggcctgttcgagtctctcgggtacggtgaagacgtggcacaagtgctcgctctgatagccaccgaacccgtgaccgatgaaatcgaaattgatggcagggtgacccacttggcaaggtcacctagaagacggctcccacagggggcaccgtgctcaccagccatcaccaatcttatttgtaggcgacttgacgccagacttgcaggactggccgctaaactgggctttgcctatacacgctatgccgatgatctcacattttccgcctcaggcgaagacgctaaaaaggtaggcgcccttctccgcgccgcccaggaaatcgtgagggccgaggggtttgaaccccatccagacaagacgagggttatgagaagaggggcccggcaggaggttacagggctcgtcgtgaacgatagacttggtgcacctagagaagcagtcagacgagcccgagctgcattgcaccgggccgagcggcaaggagtcgccgggcttaaattcggcagtggccgggacgctttggcaggactggtaggcttcgcccagttcgtcgctatgattgaccctagacagggcgcttccttggttgctagagctcgggcacttagaaggggcgcagatgaaggtgccacttctatgctgagtagggctggcctggcaagggctggattgggtgcagctgctctgcgcaaagccgccgctgctggggctcccccagaagctatgcgctggcgccctgccgaaaggccagcaccgacgctcgatcccgtgctggtcgaggccgagagagctgctgccgccaaagcccgcagggaggccgagaaggaggggagtaggcaggcaaagtccgctaggagcggaacgtctgtgccgcctgtgcggggagccggaactggcgcaagtggaggagggggacccgctcgcgctgtttgggggcgcaccgcaacacccgagctcggagagtcttccgccgagtgggctagacctgccactccaagacggtctttctggtcacttgctgtgacaggttggttgatcttgatggccttggctgtactgccattcgcaccatggctgactgcactgcttggctatctggtgtaccggagacttcgg

SEQ ID NO: 1289 - DNA, 1917 bp, synthetic construct
  source 1..1917: mol_type = other DNA; note = MG164-5_cloned_into_untethered_plasmid
gcatgcgtcgacgccaaaagaattgtgaacaaagctgaacgaaatgcagaacgctacgacgcaaaggaaatggggtatcaactctatgaggattccctcaatggtagagtttttgacaggctgatgcctatgatcatcagtgagcaaaacatcatccttgcctacagaaatatctgtaagaataacgggagcaagacacctggaaccgatggaaaaaccattgtggaaatacaggaactgccgatcgaaatggtgatcaagacgattcggaacaaactcaattactaccagcccaagaaggtgagacgcgtcgaaatccccaaagataacggcaagacccgaccactgggcattccctcaatctgggatcggctgattcagcaatgtgtgttgcaggtgctggagccaatctgcgaggccaaattccatgaacggaacaacggctttcgcccatacaggtctacccaaaatgccattgcacaatgttataaaatggcacaattgcagaacctccactttgtcgtagatgtggacattaccggtttcttcgacaacatagaccacagcaagctgatcagacagctctggggactgggaatccaagacagaaagcttatcatgataattaaacagatgcttaaagcagacatcctgttcaacgacattgttattacaccggagacaggcactccccagggaggcattctcagtccattgctggctaatgtcgttttgaatgagctggactggtgggtggcaaatcagtgggaaatgtttaagataaaagaggggagcacaggctacgagttcgctaaggtcgataaagaaggcaatgttctgactgtagatcggacccagaaatggaataagctccgagctaaaactgaactcaaggagatgtatatcgttcggtatgctgatgatttcaaaatattttgccgggactacgtaacagctaccaaggtgatgtatgcaaccaagctgtggcttgaggagaatctccatttgcagacgtctgatgaaaagtcagggatcacaaacctgcgcaaaaactacacaacctttttgggtatcaagttcaaggtggtccctaaaggcaataaatggatcattagatctcatatggctgacaaaagtaaagctaaggttatctctaaattgagctcagtatggaaggatattaagaatccttcaaagcagtccgagctggataagaatattaatctctacaacgcaatggtcatgggtatgcacaattattattgtatggcaactctggtcagtgccgacttcgccgagattgccttcaaagttactggaaagtccaacggaatgaatcataaccgctggtgctttcccatcgagaaacagggtgagataacatccaaatacattcttgagaagtatgggaaaagcaagcagttcaggtggataaacggcaggatgattgtgccaatagggtatgtcgcctacgagtacccaaaatacaagaggagggaggtgaacaaatatgtgcgaaagtacagtgacgccgaaaactgcatctcttttgaggtgatgaagtacatgatggaaaatgctcacttgtatcctactctggaaatggccgacaacgctctgagccggtatatagctcagaaggggaaatgcgccgtgacacacaacgccctcacggtcgtggacatggtttgtgaacacataaaaccttgcaaaggcgagaggaatgacacttaccgcaatcttatcatcctctccaaagaagtatcagatttggtgggagccgaaaattccaacaagattgataagattcttaagaacctgcttctgaccaaggaaatgcaggataaaattaataaattgagagagcatagggagctcgagcccatccagtttgatgactatattgggactaagaag

SEQ ID NO: 1290 - DNA, 1554 bp, synthetic construct
  source 1..1554: mol_type = other DNA; note = MG166-2_cloned_into_untethered_plasmid
gcatgcgtcgaccagaccgcactttgggaaagcgatcaacccatagtcccaaaaaaacgaggcaacgctcgagggggcaaagaattggccggtgcacggtggacaggtggcgagcctccacccataccaagagatggacatggcgtgagcccaaagctgcggtctattaccctgcgagcccgcgaagatcctacatgtaagttcacatccttggcacacctgctgacggccgatttcctgactgagtgcttccgggagcttaagaaaaataaagcacccgggattgacggagtgacagttcgcgagtacgaggcaaaactggatgagaacatctccgatctcgtggcaaggcttaaagctaaacagtatcggccacaaccagttaagcgcgtttacattcctaaaccgaacggggagagacgcccgctgggtataccagcaatcgaggataaaatcgtccaaatggccctcaagaaaatcctggaggccattttcgaggtggacttctgcgaggtgtcatacggctttaggcccaatcgaagctgccacgatgcactggacatggtagacacaaccattatgactcagcctgtgaactatgttgtagacatggacattgccaagttttttgacactgtggatcacgagtgtctgatggagtgcctgcgacagcgcatagcagacccctctttgctcagaattattgctcggtttcttaaaagtggggttatggaagatggcgtcttccaggaaatagacagaggcacccctcagggaggaatcctgtcacctatgttggctaatatctatctgcactacgccctggacctttggttcgaacaggaagtgaagaagcagcttagtggatttgcccaattggtgcggtacgctgacgatttcgtcgtgtgcttccaatataggagcgatgccgaagcttttggtgccgctctcagggaaagattggctaagtttgaattgaagatttccgaagaaaagagtaggatcatcgcctttggccgatccgcttgtcagcaagctaggaaacagggaaagaagtgtgctacctttgactttctcgggttcaccctctattgtgataaggacagaaatggaaacttcaaagtgggacggaagactgcttcaaagaagtttaggcagaagaccaaggagatgaaccagtggctgaagggcacgcgcaatcgcgtcaagctcggcctctggtggccgcttttgggaagaaaactggtggggcattatcagtactacgggatttctgggaacatcaaaggcttgcagagttattatcaccatactgtcagactcgccttcaaatggatcaataggaggagccagaagaaatcttataattggtcccagttcaacaagttcctggcaagaaatccactgcccaaacccaagatctaccacttttacgccctgagcaaaaggcggggatgtgcccctgaagaacctgacgaggggaaattgcacgtaagattttgcgagggtgctcattctcatttgggcgcctcaacacccactagaggtcggttg

SEQ ID NO: 1291 - DNA, 1404 bp, synthetic construct
  source 1..1404: mol_type = other DNA; note = MG167-4_cloned_into_untethered_plasmid
gcatgcgtcgactcaaatagactggatcaacctgctaacgttaatgagtctgaccacgaacgaacccgccttagggctagagatgtggtgagggacgaggggatctcttctctccaagcccttcagcgcgtactttatcgaagtgccaaacaggacccgacccggcggttccacgccctttacgataagctgacacgcagcgatgtgatgtggcaggcttggatcaatgtatctacgaaccagggcgcacctggcgcagatggagttagcatagatgccgtgacggccgggggatacgaaggtgtaacatcatttctggatgaactgagcacagaagtgaaggccgaaacctaccggcctcttccccttcgaagggtccacatacctaaggccggaaagtctggagagacaagaccattgggcatcccaagcttgagggacagggtgttgatgtccgccgctaaacttattctggagcccatttttgaggctcagttcagttctactagtttcgggttccgccctaagcggagcgcacatgacgctctcgaggttataaggcagagcgctaacagtggtgcccattgggtgctggacgctgacatcaagtcctgcttcgatgaaatcgatcacgaagccctgatggcattgatcgagcgaagggtgtcagacagagccatgcttaaacttctgcgctcctggttgcgcgccgggatcattgagggcggggtgtattcagacagtgacagtggcaccccacaggggtcccccatctcacccctgctgtgcaacatagctctttccgttctggatgaggcactcgccaaagccaaatcacaaacagggagtgtggtacggtatgctgacgattgggtcgtcctgtgtgcaaccaaaaagcgcgctgagactgcacgatcaattgccgaggctgctctcgccccactcggcctcagattgcacccagaaaagactagaattgtccatctcacaagaggaactgaaggctttgactttctcggctttcaccaccatatggtcgagtcctggaagtggcctgggcgatactacctgcagagatggcccagcgaccgcgccatggccagcattaaggtgaaagtgagagaaatgaccgacagaaggtacgtcggattgtctctcgacgatgttgtcgatcggttgaacccggttctgaggggttgggcaggctatttcaggagaggtaatagcagtcggaaattcaatgttatcgattcttatgtggcagaacggatggctattcttgcttccaacaaatatggtctgtccggacgaaattggggcactcggtttagctatgagtggtttaaatctctgggagtctacgcactgtccggaaaggtgatttcacgaaccgcacatgcacag

SEQ ID NO: 1292 - DNA, 1857 bp, synthetic construct
  source 1..1857: mol_type = other DNA; note = MG169-1_cloned_into_untethered_plasmid
gctaagggcggaagctacataaactcaatcctcctcatggagaacgtgaagtacataatgacaaaccccgagattatactgaataacctggtgaaacactccaagatctccggctataagttcgaacgcttgtatcggatcctgtttaatgaacagatgttttaccaggcttatcagaggatcgcctccaagaaaggtaatatgacaagtggtaccgacggtaagaccgtggatggcatgtcaatcgagcggattgaacgactgatagccagcctgagagatgaaacatataagccacacccagcaaaacgggtgtacatcccgaaaaaaaacgggaaaaagagaccccttggaataccctctttcgaagacaaactcgtgcaggaagtggtgaggatgatcctggaggccgtatatgagggatactttgagagcacctctcacggattccgccccagaaaatcctgtcagactgctcttacctccatccggaatacttttcttggcacgaagtggttcattgaaggagacataaaggggttctttgataatatcgatcacaatgtcctcattgaaactctgcgcgaaaggattaaggacgatcgcttcctgagattgattaggaagtttctcaatgccggctatattgaggactggaagtttaataacacctactcagggactccgcagggcggaatcattagtcctattttggccaacatctacctggataggttcgacaaatatattgcagagtatatacagaagttcgataccggaaaaactagacctaagaaccgagagtacagaatttactcagaccgcaagagacggctcttggcaaaattcaatgccgagacagacgcagataaaagagaggaaatggctcaacggctcaaagagtacagcaggctcatgtacgagcacccttcagttgatgagatgacccctacgtataagagaatgaaatacgtgcggtatgctgatgacttcttgattggggtttgcggcagcaaagctgaatgcgaaatcatcaagaacgatattgctatgtttatgaaagagaagctcaagctcgagctctctgatgaaaagactcttatcactaatgctaaagacagggcactgttcttggggtacgaaattaccgttcgacagagccaaagtacaaagcgagacaaaaacggtatgctgaaacgcatgtttaatggcaaggtgatccttctgctgccccgagaagtcgcaagaaagcgactcctgtcttataatgcaatgacaatcatacaggtgaatgggaaggaagactggaaacctaagagcaggggagccatgaacaattgtaaaccagaagatattctcgccaaagtcaactccgagattcggggcttctataactactacgccattgcaaataacatctcaactctcggcaagagatttggctacgtcatgtcctatagtttttattgcacactggcccagaagctcaacatcagttaccccaaagtgataaaaaagtatagagaggggaaggactgtgtcattcgctataccgacgctaaggggcgagaaaggtgtaggatgctttataacgggggttttcaacagaaagagccaaccgctgacgccaaatgcgacaatttgccaaatcctttcgttatctcttctccatctctggtcgagcgccttaaagcagaagtatgtgagctttgcggagccaaaggtaaaaccgttatgcatcatgtgcggacgctgaagacactgacagagaacacagcttgggagagggctatgctgcaaatgcatcggaagagcctcgccgtatgtcctaattgctacgcccatatccacgatgat

SEQ ID NO: 1293 - DNA, 1014 bp, synthetic construct
  source 1..1014: mol_type = other DNA; note = MG173-1_cloned_into_untethered_or_tethered_plasmid
atggagaagaatttgaagtctgtgtatcttggcagactccagaatgcactggaggcccagcaaaggacgaaggaagaaatcatcacatgtacacaatatgcccagaaactcatggctgataatttgccagtcctttttgaagagaatcacgtttaccaggtgctgaaatggaagaagagtaaccagcagcagtaccacaccttctatctggtgcagaaagggaaggaaagaaagataactgcccccagccgagagctgaagcggcgacaacggtggattctggacaacattttgattaaactgaaggtgtcagattacgcacatggatttgtgaaaaacaggtcaattcggaccaatgcagaacttcatatgactcacgactatgcactgtgtatggatatagaggatttcttcccatctattaaggaggataccgtcaaggaggtcttcgccagagctggctacagccgccgcgccgccaatgctcttgctgacatgtgctgctattttggggcccttcctcaaggggccccaactagtccttatctcgcaaacctcgtcttcatcgaaaaggaccacgaactggccctgcttgcaaaacagcatgacgcaacctattccaggtacgctgacgatctcacattttcatccgacaaccctctggggaaccttagcgaggctgtgaatcaggttttgcagaataatggattcaggctgaacgactctaaaaccaaggagttttttcctggacagcccaaaaggattacaggtttgatagtacagaatggattgatcagagttcccagaaagttcaaacggacactcaaacaggagatctattattgcaagaaatacggtgtggctctgcacctggagaacactcgagctcataaagctatcaactaccgcgaatacctttacggcaaggcctactatgtaaacatgattgaacccgaacttggcaaacactatctgaaacaactggatgagatcctctggccgtcctactacctt

SEQ ID NO: 1294 - DNA, 1011 bp, synthetic construct
  source 1..1011: mol_type = other DNA; note = MG173-2_cloned_into_untethered_or_tethered_plasmid
atgagctatgtccagaagctcaaggataagatggtggagcagggcgaggatgagaactacgtggagctgtgcgtaagctatacccaaaaactgtgcaataacagtgtacccgttattttcgacttcaagcacctgagtctgctgctcggctacgaaccgccagaacttgcattctacctcttcgcccctgaggactcattttacaccaaaatgcaaatccctaagaagtctggtggaatgcgcgagatcgagataccctctgacaaacttaaaagcatacagcgatggattttgcggaacgttctcgagaatatcgaggtgcatgaatcctgttacggctttactaagggcaaatctatctatgacaatgcacttcttcatgttgggaaggaatgtgtcctgaatatggacctgaaagactttttcccttcaattactcagaaagctgtgtttaatattttctaccagaaaggatacactaaaagcgtcagttattatcttgctaaacttttgacaaaagacggagtgctccctcaaggctccccagcaagccccaaaatttctaacatcgttgctctgcatctcgataagaggctgtccgaattggccaagtgctacaaagcaacatattccaggtacgccgatgatctgaccttttctggagctagtaacatcaaaaatatgataccaattattacacagatcatacacgaggaggccttcttcgtaaatgagaagaagacgagatactcatattattttcagaagcaggaagtcactggtctgatagtcaataagaaggtgtcagtgcccaaagaatatctcagagaactgaacaaggagatttactattgtaaaaagttcggggtgagctcacaccttaccaagattgaaaaccacaaatccttttttaaggagtacatgtatgggaaagcctactttgtgaacatgatcgataaggaattggggcagaagatcctttgcgaactggatacaatcttgtgggaatat

SEQ ID NO: 1295 - DNA, 753 bp, synthetic construct
  source 1..753: mol_type = other DNA; note = MG160-4_cloned_into_untethered_tethered_plasmid
gttacccagaagtggacccatcgataccagttgaaacccggccgatgggtttttgcccccacagatgaggccaagaagtgcggtgctcacattaagcgcagcgtggcttccaggtggaaggccccaaacttctactatcacctcagaaatggcgggcacgttgcggccgtacggtcccacgaactgagccggtttttcttccgggcagatttggacgatttctttgggagagtgaaccggtctcgcgtgacccggtgccttaaaccttggttctcatacgccgaagcaagggagatggcctcagaatctgtcgtgaagcgacctggagagacagcctttgtgctgccgtatgggttcgtgcagagccctatcctcgcatccttggccctggacaagagtaaactgggtagcctgctgagatcactggacgggggccgcgatttcacggtgagcgtctatgtcgacgacatcattatctctggagacgacgaagctcaacttaaagaggtagcatcccgccttgagagagtggcgagtgaggccctgtttccactcagcagtggcaaaactcagggacccgcctctggagtgactgtttttaacatagaactgtcccatagaatgctcaggattaccgatgataggctcgcttcactgaggctcgactatcaggcgactgcatctgagcattgtaaagctggcatcgtctcctacgtatacagtgtgaatccagatcaggtcgctcaagtgaca

SEQ ID NO: 1296 - DNA, 1257 bp, synthetic construct
  source 1..1257: mol_type = other DNA; note = TGIRT_cloned_into_untethered_plasmid
gctctgttggaacgcatcctggctcgtgataatttgattactgccctcaagcgtgtggaagctaaccagggtgcacccggaatcgatggtgtatcaacggaccaactgcgcgactatattcgagctcactggtcaaccattcatgcacaattattagccggtacatacagacctgctcctgtgagaagggtggaaattccgaagcctggcggcggcactaggcaactgggcatccccacggttgtcgataggctgatacaacaggccatccttcaggaactcacaccgattttcgatccagatttctcatcaagttctttcgggttccgcccaggacggaacgcacacgatgctgtgcggcaagcccaaggttatatacaagagggctaccgttatgttgtggacatggaccttgagaagttctttgacagagttaatcacgatatactcatgtcacgggtcgccaggaaagttaaagataaaagggtacttaagttaataagagcatacctgcaagccggcgtgatgattgaaggggtgaaggtgcaaaccgaagagggtaccccacagggtggtcccttatcccctctcttagccaatatattgctggatgatcttgacaaggagcttgagaagcgaggcttgaaattttgtcgatacgccgacgattgtaatatctatgtaaaatccctgcgcgcagggcagagagttaaacagtccatccaaagattcctggagaagactttgaaacttaaagtaaacgaagaaaagagtgccgtagaccgcccgtggaagcgtgcttttcttggtttcagcttcacccccgagcgtaaagcccgcattcggttggctcctagatctatacaacggttgaaacaacgaatccgacaattgacaaatcctaattggtccatttctatgcctgagcgtattcatcgcgtcaatcaatatgtgatgggttggattggatattttagacttgtggaaacacccagtgtcttacaaacaatagagggatggatacggcgaagactgagattatgccagtggctgcaatggaagagggtacggacccgaatcagagaattacgcgctctgggactgaaggaaactgcggtaatggagatcgccaacaccaggaaaggtgcgtggagaaccacgaagacaccccaacttcatcaagccttgggcaagacttactggaccgcacaagggctcaaaagcttgactcaacggtactttgaactgagacaaggg

SEQ ID NO: 1297 - DNA, 1491 bp, synthetic construct
  source 1..1491: mol_type = other DNA; note = Marathon_cloned_into_untethered_plasmid
gctagcgccaccatgtacccctatgatgtacctgattatgcttctggcggcagcagcggcggctcaagcggaagtgaaacacctggaacttccgaaagcgctacgcctgaatcttctggtggatcttctggcggatcttccgcatgcgacacttcaaacttaatggaacaaattctgagttctgacaacctcaacagggcatacttgcaagttgtgcgtaataaaggagccgagggcgtggacggtatgaaatacactgagcttaaagaacatctggccaagaacggcgagacgataaaaggtcaactccggacaaggaagtacaagccccaaccggcgcgaagagtcgaaattcccaaaccagatggcggagtgcggaacttaggagttcccaccgttacagataggtttattcaacaagccatcgcccaagttcttactccgatttatgaggagcaatttcatgatcatagctacgggtttagacccaaccgttgcgctcaacaggcaatcctgaccgctttaaacatcatgaatgatggcaatgactggattgtcgatatagatcttgaaaagttctttgacaccgtaaatcacgacaaacttatgactctgattggacgtacaatcaaggacggcgacgtgatcagcatcgttagaaagtatcttgttagcggcatcatgattgatgacgaatatgaagacagcatagtgggcacgcctcaaggtggcaacctgagcccactgctggctaacattatgctcaacgagctggataaagaaatggagaaacgcgggctcaactttgtgcgatacgcagatgattgcatcattatggtgggatctgaaatgtctgctaatcgagttatgcgtaacatatcccgcttcattgaagaaaagttagggctcaaggttaacatgacaaagtccaaggtggatcgaccttcaggccttaagtatctgggatttggcttttattttgaccctcgtgcacatcaattcaaagctaaacctcacgctaagagtgtcgccaagttcaagaagcgaatgaaagaattgacttgccggagctggggcgtctccaatagttacaaagtggagaagctcaatcaactcatacgcggctggattaactacttcaaaattgggtctatgaaaactttgtgtaaagagctggactcccgcatccgctacagactgagaatgtgcatttggaagcaatggaagacgccacaaaaccaagagaagaatcttgtcaaactgggaatcgatcgcaacacagcacgccgggtagcatataccggcaagaggattgcttacgtttgtaataagggagccgtaaacgttgctatcagtaacaagagactcgcgagtttcggtttaattagcatgttggactactatatagaaaagtgtgtcacatgtcctaggcctaagaagaaaagaaaggtgggtggttctcctaagaaaaagagaaaggtctgagaattc

SEQ ID NO: 1298 - DNA, 1278 bp, synthetic construct
  source 1..1278: mol_type = other DNA; note = Marathon-mutant_cloned_into_untethered_plasmid
gacacttcaaacttaatggaacaaattctgagttctaggaacctcaacagggcatacttgcaagttgtgcgtaggaaaggagccgagggcgtggacggtatgaaatacactgagcttaaagaacatctggccaagaacggcgagacgataaaaggtcaactccggacaaggaagtacaagccccaaccggcgcgaagagtcgaaattcccaaaccaaggggcggagtgcggaacttaggagttcccaccgttacagataggtttattcaacaagccatcgcccaagttcttactccgatttatgaggagcaatttcatgatcatagctacgggtttagacccaagcgttgcgctcaacaggcaatcctgaccgctttaaacatcatgaatgatggcaatgactggattgtcgatatagatcttgaaaagttctttgacaccgtaaatcacgacaaacttatgactctgattggacgtacaatcaaggacggcgacgtgatcagcatcgttagaaagtatcttgttagcggcatcatgattgatgacgaatatgaagacagcatagtgggcacgcctcaaggtggcaggctgagcccactgctggctaacattatgctcaacgagctggataaagaaatggagaaacgcgggctcaactttgtgcgatacgcagatgattgcatcattatggtgggatctgaaatgtctgctaatcgagttatgcgtaacatatcccgcttcattgaagaaaagttagggctcaaggttaacatgacaaagtccaaggtggatcgaccttcaggccttaagtatctgggatttggcttttattttgaccctcgtgcacatcaattcaaagctaaacctcacgctaagagtgtcgccaagttcaagaagcgaatgaaagaattgacttgccggagctggggcgtctccaatagttacaaagtggagaagctcaatcaactcatacgcggctggattaactacttcaaaattgggtctatgaaaactttgtgtaaagagctggactcccgcatccgctacagactgagaatgtgcatttggaagcaatggaagacgccacaaaaccaagagaagaatcttgtcaaactgggaatcgatcgcaacacagcacgccgggtagcatataccggcaagaggattgcttacgtttgtaataagggagccgtaaacgttgctatcagtaacaagagactcgcgagtttcggtttaattagcatgttggactactatatagaaaagtgtgtcacatgt

SEQ ID NO: 1299 - DNA, 1161 bp, synthetic construct
  source 1..1161: mol_type = other DNA; note = MG153-53_cloned_into_untethered_plasmid
gtcgacaagaagagaaaatggtacagtctggttgacaagatctggaaattcagtaacctcgaagcagctttcagcaaagtaaaagagaaccggggagccgcagggatcgacagagtgagcatcggccagttcgagaggcagaagcaacagaatcttttggagatccaaagacttctgaggagcaaacgctacgaggcaattccagtcagacgcgttgaaatacctaagagcgacggacggtatagacctctgggcattcctacggtcagagatcgcgtggtgcagcaggctacctttgctgttatgtcccctatttttgagacaaagtttctggactgttcttacgggtttaggaagggacgaaatacgcaccaggccattgccaaaatggaacaatacaggaatgagggctgcgagtgggtggtggaagctgatatagagtcattttttgacaccgttaatcacgagttgcttattgatcaggttgctgaggaaatctcagatggttcagtgcttaagcttattaggtcctggctgactgccggcgcatttaaaggaacagaagtgattgagacttctgtgggaacaccacaagggggtgtcatttccccgcttctcgcaaatatatatctgcacccattcgatgtacagatgacagccctgggcttcaagctggtgaggtatgccgatgatttcgtcataatgtgcagaagcgaggacgaggcagaacgggccatggaagccgctacccggatcctctctgggattaaactccgggtaaaggccgctaaaacccgaatagtgcagctgagtaaggacgacggaatcgaatttctcggtttcaccatcttcaaggaacataaggtcccccgaactagagctgtcgagaatttcaaatcacgcattcgcctgatcactcgaagacagaggcccgctacccttcaggagatcatcaaggaactgaatcccgtggtgcggggttggggaaactatttcaaaattgccaacgtaaactggctctacaaaggcttggattcttggatgcgaatgcgccttcggtcttttctcgagaagaagaagagctatgaagccaacaaaaggctggaaaacaaacattttagtgaagcaggcttgactacactgtcctccttgatcgggtac

SEQ ID NO: 1300 - DNA, 1914 bp, synthetic construct
  source 1..1914: mol_type = other DNA; note = MG151-98_cloned_into_tethered_or_untethered_plasmid
gacaatattaagcaattatctgtgttgcctggactgtccgaggacccttccgcagtcggcttgcttcaggtgaaagagcagcaggtgcctattgcgactaaggcagttcatcgcagacagtataggacaaatcgggactcattattaccaattcacaaattgatccggcagctggaaagtcagggcgtcatcagcagaacccattcccccttcaacagccccatttggcctgtgaggaaggcctcaggcgaatggcgactgaccgtggactacagggggttgaatgaagtcacccctccgttaagtgcagccgtgccggatatgctggaattgcagtatgagctggaatccaaagcagctaaatggtatgctactatcgacatagccaatgcattcttttccatccctcttgccagggagtgtaggccccagttcgcctttacatggaggggcatccaatatacttggaatcgcctgcctcagggttggaagcatagtcccacaatctgccacggcctcatccaaactgtgctcgagcaggggagcgcacctgagcacctgcagtacattgacgatattgtggtgtggggcgacaccgccgaggacgtgttcaagaaaggagagcaaattatacagatcttgctgcaggccggcttcgcaatcaaacgaagcaaggtgaaggggcccgctcaggagatccagttcttaggcattaaatggcaggacggccgccgccacatcccagcagatgtcatcgataagatcacagcaatgtcaccccccattaacaaaaaagaaacgcagtcttttctgggcgtagttggattttggaggatgcacgtcccaaactactcccttattgtgtcaccattgtatcaggtgactcgtaaaaaaaatgacttcacctggggacctgaacagcagcaggcatttgagcagattaaacatgaaatcgcccgggccgtagcactgggaccggtaaggacaggccaggatgtgaaaaacatcttatacacagctgctggcgaaaaaggtcctacatggagcctgtggcagcgtacttccggtgagactagggggcgccctctcgggttctggagccgggcttaccgggggtccgaggaatgctataccccaactgaaaaagaaatactcgcagcatatgaaggtgtgcgagcggcaagtgaagtggttggaactgagacccagctcttgctggcaccccgcctgccagtgctcaactggatgtttaaggggaaaataccctccacccaccacgcgaccgacgcaacctggtctaagtggattgcactcattacacaacgcgcccggatgggcaacttctccaggccgggcatattggaggtcataatggactggccggagggaaagaaattcgagacctcccctggcgaagaggtgtcacgagccaaagaagcgcccccttacaacgagttgcccggaaacgaaaagaagtatgcattgttcactgatggaagctgtcgcattgtgggcaaatatcggagatggaaagccgcagtatggagccctgtgcgccaggtagcagaagccacagagggaaagggggagagcagccaattcgcagaggtcaaagccgtccagcttgcactcgatgttgctgaaagggaaggctggccagtgctctatctgtataccgactcttggatggtagccaatgccctgtgggggtggttacaacagtgggaacaaaacaactggcagcggcgcggaaagccgatatggtcagccgaactttggaaggacatcgctgcccgcattaagaatatggtggtaaaagtgaggcacgtggacgcacatatgccgaaatcccgagccacggaggaacaaaagaacaaccatcatgtagaccaggccgctaagatagaagtagcc

SEQ ID NO: 1301 - DNA, 1914 bp, synthetic construct; identical to SEQ ID NO: 750
  source 1..1914: mol_type = other DNA; note MG151-98-H171N_cloned_into_tethered_or_untethered_plasmid

SEQ ID NO: 1302 - DNA, 1416 bp, synthetic construct; identical to SEQ ID NO: 753
  source 1..1416: mol_type = other DNA; note MG151-98-166AA_cloned_into_tethered_or_untethered_plasmid

SEQ ID NO: 1303 - DNA, 1416 bp, synthetic construct
  source 1..1416: mol_type = other DNA; note MG151-98-H171N-166AA_cloned_into_tethered_or_untethered_pla smid
gacaatattaagcaattatctgtgttgcctggactgtccgaggacccttccgcagtcggcttgcttcaggtgaaagagcagcaggtgcctattgcgactaaggcagttcatcgcagacagtataggacaaatcgggactcattattaccaattcacaaattgatccggcagctggaaagtcagggcgtcatcagcagaacccattcccccttcaacagccccatttggcctgtgaggaaggcctcaggcgaatggcgactgaccgtggactacagggggttgaatgaagtcacccctccgttaagtgcagccgtgccggatatgctggaattgcagtatgagctggaatccaaagcagctaaatggtatgctactatcgacatagccaatgcattcttttccatccctcttgccagggagtgtaggccccagttcgcctttacatggaggggcatccaatatacttggaatcgcctgcctcagggttggaagcatagtcccacaatctgcaacggcctcatccaaactgtgctcgagcaggggagcgcacctgagcacctgcagtacattgacgatattgtggtgtggggcgacaccgccgaggacgtgttcaagaaaggagagcaaattatacagatcttgctgcaggccggcttcgcaatcaaacgaagcaaggtgaaggggcccgctcaggagatccagttcttaggcattaaatggcaggacggccgccgccacatcccagcagatgtcatcgataagatcacagcaatgtcaccccccattaacaaaaaagaaacgcagtcttttctgggcgtagttggattttggaggatgcacgtcccaaactactcccttattgtgtcaccattgtatcaggtgactcgtaaaaaaaatgacttcacctggggacctgaacagcagcaggcatttgagcagattaaacatgaaatcgcccgggccgtagcactgggaccggtaaggacaggccaggatgtgaaaaacatcttatacacagctgctggcgaaaaaggtcctacatggagcctgtggcagcgtacttccggtgagactagggggcgccctctcgggttctggagccgggcttaccgggggtccgaggaatgctataccccaactgaaaaagaaatactcgcagcatatgaaggtgtgcgagcggcaagtgaagtggttggaactgagacccagctcttgctggcaccccgcctgccagtgctcaactggatgtttaaggggaaaataccctccacccaccacgcgaccgacgcaacctggtctaagtggattgcactcattacacaacgcgcccggatgggcaacttctccaggccgggcatattggaggtcataatggactggccggagggaaagaaattcgagacctcccctggcgaa

SEQ ID NO: 1304 - DNA, 1416 bp, synthetic construct
  source 1..1416: mol_type = other DNA; note MG151-98-K297P-166AA_cloned_into_tethered_or_untethered_pla smid
gacaatattaagcaattatctgtgttgcctggactgtccgaggacccttccgcagtcggcttgcttcaggtgaaagagcagcaggtgcctattgcgactaaggcagttcatcgcagacagtataggacaaatcgggactcattattaccaattcacaaattgatccggcagctggaaagtcagggcgtcatcagcagaacccattcccccttcaacagccccatttggcctgtgaggaaggcctcaggcgaatggcgactgaccgtggactacagggggttgaatgaagtcacccctccgttaagtgcagccgtgccggatatgctggaattgcagtatgagctggaatccaaagcagctaaatggtatgctactatcgacatagccaatgcattcttttccatccctcttgccagggagtgtaggccccagttcgcctttacatggaggggcatccaatatacttggaatcgcctgcctcagggttggaagcatagtcccacaatctgccacggcctcatccaaactgtgctcgagcaggggagcgcacctgagcacctgcagtacattgacgatattgtggtgtggggcgacaccgccgaggacgtgttcaagaaaggagagcaaattatacagatcttgctgcaggccggcttcgcaatcaaacgaagcaaggtgaaggggcccgctcaggagatccagttcttaggcattaaatggcaggacggccgccgccacatcccagcagatgtcatcgataagatcacagcaatgtcaccccccattaacaaaaaagaaacgcagtcttttctgggcgtagttggattttggaggatgcacgtcccaaactactcccttattgtgtcaccattgtatcaggtgactcgtcccaaaaatgacttcacctggggacctgaacagcagcaggcatttgagcagattaaacatgaaatcgcccgggccgtagcactgggaccggtaaggacaggccaggatgtgaaaaacatcttatacacagctgctggcgaaaaaggtcctacatggagcctgtggcagcgtacttccggtgagactagggggcgccctctcgggttctggagccgggcttaccgggggtccgaggaatgctataccccaactgaaaaagaaatactcgcagcatatgaaggtgtgcgagcggcaagtgaagtggttggaactgagacccagctcttgctggcaccccgcctgccagtgctcaactggatgtttaaggggaaaataccctccacccaccacgcgaccgacgcaacctggtctaagtggattgcactcattacacaacgcgcccggatgggcaacttctccaggccgggcatattggaggtcataatggactggccggagggaaagaaattcgagacctcccctggcgaa

SEQ ID NO: 1305 - RNA, 135 nt, synthetic construct; identical to SEQ ID NO: 111
  source 1..135: mol_type = other RNA; note = AAVS1_PBS_8
  modified_base 1..3: mod_base = OTHER; note = 2'O-methyl ribonucleotide
  modified_base 1..4: mod_base = OTHER; note = phosphorothioate linkage
  modified_base 133..135: mod_base = OTHER; note = 2'O-methyl ribonucleotide
  modified_base 132..135: mod_base = OTHER; note = phosphorothioate linkage

SEQ ID NO: 1306 - RNA, 137 nt, synthetic construct; identical to SEQ ID NO: 112
  source 1..137: mol_type = other RNA; note = AAVS1_PBS_10
  modified_base 1..3: mod_base = OTHER; note = 2'O-methyl ribonucleotide
  modified_base 1..4: mod_base = OTHER; note = phosphorothioate linkage
  modified_base 135..137: mod_base = OTHER; note = 2'O-methyl ribonucleotide
  modified_base 134..137: mod_base = OTHER; note = phosphorothioate linkage

SEQ ID NO: 1307 - RNA, 140 nt, synthetic construct; identical to SEQ ID NO: 113
  source 1..140: mol_type = other RNA; note = AAVS1_PBS_13
  modified_base 1..3: mod_base = OTHER; note = 2'O-methyl ribonucleotide
  modified_base 1..4: mod_base = OTHER; note = phosphorothioate linkage
  modified_base 138..140: mod_base = OTHER; note = 2'O-methyl ribonucleotide
  modified_base 137..140: mod_base = OTHER; note = phosphorothioate linkage

SEQ ID NO: 1308 - RNA, 147 nt, synthetic construct; identical to SEQ ID NO: 115
  source 1..147: mol_type = other RNA; note = AAVS1_PBS_20
  modified_base 1..3: mod_base = OTHER; note = 2'O-methyl ribonucleotide
  modified_base 1..4: mod_base = OTHER; note = phosphorothioate linkage
  modified_base 145..147: mod_base = OTHER; note = 2'O-methyl ribonucleotide
  modified_base 144..147: mod_base = OTHER; note = phosphorothioate linkage

SEQ ID NO: 1309 - DNA, 4146 bp, synthetic construct
  source 1..4146: mol_type = other DNA; note = MG71-2(H883A)_untethered_or_tethered_plasmid
cagaacaagaagaacgtcgactactacgtcggcctggacatgggagatgcctctgttggatgggccgtgaccgacctgaactacaacatcctgaagttcaacggcaaggccctgtggggcatcagactgttcgattctgccgaaaccgccgctgccagaagaggctttagatctgccaggcggcggatcgacagagtgtcttggagaatctccatgctgcaagagctgttcgccgacgagatcgccaaagtggatgccggcttcttccagcggctgaaggatagcagactgcaggtcgaggacaagcaagagaaaaccgcctacaacctgttcgtgggccagaactacaccgacaaggacttctaccagcagtaccccaccatgtaccacctgagatacgccctggctacacaggccggaccttttgatgtgcggctgctgtatctggccgtgcagcacatcgtgaagcaccggggccactttctgttcgagaacctggacgccagcaaagtgggcgatttcgtggccgtgtttggcgaggtggaaagctacgtgcacgacgagatggaactggacgagtggtactgccacgacatcgatgccctggccaaggtgctgtgcaatgccaatctgggcatcaccgccaagcagaaggccatccagaatctgctgcccgccaagaccaagcaagaaaaggccatcgtgcagctgctgagcggcggaaaggccaagctgtgcgacctgttctgtgacgaggaactggccgaatgcgagaaaaagagcatcagcttccaagaggacaacctcgatgagctggaacccatcctggaagctatcctgcaagagagatacgaggccctgctgcggttcaaggccgtgtatgattggagcctgctggccaagatcctgagactggacgccgacaagaaaagcgagaacgagatgcacctcctgagcgagtgcaaagtgaaggtgtacgaggaacacaagaaagacctggctgtgctgaagtccatgctgaagggcaagcccctgtacaacaagctgttcagacaggacggcgaggacacctacgccaattacgcccagggaatcaaagggatcaaccaggtggacttctgcaagtccctgaagaagcagctggaatctatcggcgagtacaagaaacagatgcagcagctgaccagcttcgaggacgcccagaccgatgtggaaagactgctgtttagagtggccaacggcctggctttccccaagcagaccaccaaggacaacggcatcatcccaatccaggttcacctggccgagctgcagtgtatcctggctcacgccgagaagtacctgcctttcctgaagaacgccgacgccaatggcctgagcgtgcgggaaaagatcacccagatcgtgaagttcagaatcccctactacgtgggacccctggccggcacaagactgtctagagaacagggcagatgctgggtcgagcggagagccgagctgaagaatgagaagatctacccctggaacttcgacaaggtggtggacctggaagcctccgccgagaacttcatcaccaacatgaccgccaagtgcacctacctcgtgggcgaagatgtgctccccaaagagtccctgctgtactccgagttcatggtccgaaacgccctgaacaacctgaccatcgacggcgagagactgcccgtttctctgctgcagaaaatctacaagcagctgttcctggaaaagaccttcaaagtgaccaagaaggccctggaacggttcttcaaacaagagaatgtgtcctaccacgatatcggcggcatcgacgacaagatcaacgcctccatgaaggcctacaacgacttcaagcggatcttcggcgaggcctacatcgaaatgcaccgggatgagatcgagaacatcatccggtggatcaccctgttttgcgacgagaagaagatgctcgagacaaagatccgcaagacgtaccctcagatccccgatgataagatcaaggccattaagaagctgaagtacaaggactggggcagactgagcgccacactgctggattctggcaagatcgcctacgaggatgccagcgtgggcgagagaatcaccatcatctctgccctgcggcacaccaacaagaatttcatggaactgctgagcagcaactgccagtacgacttcatcggcaagattaaggacttcaacggctccaagcagagcgacaatggcaagctgacctacaaggatgtggaagaactgtacgtgtcccctagcgtgaagcggagcatctggcagaccctgaccattctggaagagatcaagaaaatcatgggctgcgagcccaagcgcatcttcatcgagatggccagaagcaaagaggaaagcctgcggaccaacagcaggctgcagagactccaggacctgtacaagaagtgcaaagaagagaacatcgacttcatgcccaaggccgacgagctgaccgacatcagatctcagctccagtgcaagaacgaagaggacctgcggagcgacaagctgtacctgtactacacccagatggggagatgcatgtacaccggcgagaggatcgaactggccagcctgtacgaccagaacaaatacgacgtggacgccatctaccccaggtctaagaccaaggacgacagcctgaacaatcgggtgctcgtgaagaaagagattaacagcgccaagacagacaactaccccatcgacgctgacatccggaagaaaatgcacgccttttggaagatgctgtacgacaagggcttcatcgaccaaaagaagtacgagcggctgaccagaagcacccagctgacagatgaagaactggctggcttcatcaaccggcagctggtggaaaccagacagagcacaaaggccaccgccgacattctgaagtctgcctacgagcacagcgaggtggtgtatgtgaaggccggcaacgtgtccgatttccggcagcagttcgacttcgtgaagtgccgggaagtgaacgacctgcaccacgccaaggacgcctacctgaatatcgtcgtgggcaactgctaccacgtcaagttcaccatcaatccgctgatgttcatccggggcaaccaggacaaccggcggtactctctgaagcccgaggtgttctacgcccacgacattaagcggaacggggagattgcttggctggccggcgataatggcaccatggccacagtgaagagagtgatgcagaaaaacaacgtgctgttcacccggctggccgtggaaggcaaaggcgagctgttcaagcagaaccctctgaaggccaagagcggccagctgcctcttaaagccggcctgagcatcgataagtatggcggctacgactccctgagcaccgcctattttgccctggtggaatccgagggcaagaaaggcgccgtgcagtttacaatcgaggccattcctctggtgtacgccaaacagggcgaagccaccatcaagaaatacctgacagaggtggtgcagctgtgcaagcccgagatcaaagtgatgcggatcaagaagtactccctgctgaagatcaatggcttccccatgcacatctccggcagaaccggaaagcagctgatcttctacgtggccagccagctgtgtatcgacgagaacagcgtggcctatctgaagaaagccctgaagtatgagagcaacctcgaggaaaacgaggccatcctggccgataagaatgccgacgagtccatgaagcagaaagccttcaaccggctcatgttctacaaggacacctggggaatcagcgccgaggctaacctgcagctgtacgatatgctgctggctaagagcgccaacaacctctacaagaacagacccgccagccagaccgccactctgaaagagaagagagagcagttcgccaagctgagcctgagcaagcagatccacgtgatcaaagagatcctgaacctgttcaagtgcgcctccgccagcgccgatttcaagctgcttgataagggcgctgcctgcggcatcctgaaagtgtccaacaacatcaccaagctgaagcagtgcgtgctgatcaatcagagccccaccggcgtgttcgagcaagaggttgacctgatgagactg

SEQ ID NO: 1310 - RNA, 162 nt, synthetic construct
  source 1..162: mol_type = other RNA; note chemically_modified_guide_5nt_change_MG71-2_AAVS1_PBS_6
  modified_base 1..3: mod_base = OTHER; note = 2'O-methyl ribonucleotide
  modified_base 1..4: mod_base = OTHER; note = phosphorothioate linkage
  modified_base 160..162: mod_base = OTHER; note = 2'O-methyl ribonucleotide
  modified_base 159..162: mod_base = OTHER; note = phosphorothioate linkage
tctgggagagggtagcgcagggtggtttgagagtgagaaatcacgagttcaaaaaacatgatttattcaaaccgtcttcttcggaaggccccacagtgtgtggacagtaaagcttgcttcggcaagctttttgcccggttctcagtgtagcgcctgcgtttt

SEQ ID NO: 1311 - RNA, 164 nt, synthetic construct
  source 1..164: mol_type = other RNA; note chemically_modified_guide_5nt_change_MG71-2_AAVS1_PBS_8
  modified_base 1..3: mod_base = OTHER; note = 2'O-methyl ribonucleotide
  modified_base 1..4: mod_base = OTHER; note = phosphorothioate linkage
  modified_base 162..164: mod_base = OTHER; note = 2'O-methyl ribonucleotide
  modified_base 161..164: mod_base = OTHER; note = phosphorothioate linkage
tctgggagagggtagcgcagggtggtttgagagtgagaaatcacgagttcaaaaaacatgatttattcaaaccgtcttcttcggaaggccccacagtgtgtggacagtaaagcttgcttcggcaagctttttgcccggttctcagtgtagcgcctgcgcttttt

SEQ ID NO: 1312 - RNA, 166 nt, synthetic construct
  source 1..166: mol_type = other RNA; note chemically_modified_guide_5nt_change_MG71-2_AAVS1_PBS_10
  modified_base 1..3: mod_base = OTHER; note = 2'O-methyl ribonucleotide
  modified_base 1..4: mod_base = OTHER; note = phosphorothioate linkage
  modified_base 164..166: mod_base = OTHER; note = 2'O-methyl ribonucleotide
  modified_base 163..166: mod_base = OTHER; note = phosphorothioate linkage
tctgggagagggtagcgcagggtggtttgagagtgagaaatcacgagttcaaaaaacatgatttattcaaaccgtcttcttcggaaggccccacagtgtgtggacagtaaagcttgcttcggcaagctttttgcccggttctcagtgtagcgcctgcgctactttt

SEQ ID NO: 1313 - RNA, 169 nt, synthetic construct
  source 1..169: mol_type = other RNA; note chemically_modified_guide_5nt_change_MG71-2_AAVS1_PBS_13
  modified_base 1..3: mod_base = OTHER; note = 2'O-methyl ribonucleotide
  modified_base 1..4: mod_base = OTHER; note = phosphorothioate linkage
  modified_base 167..169: mod_base = OTHER; note = 2'O-methyl ribonucleotide
  modified_base 166..169: mod_base = OTHER; note = phosphorothioate linkage
tctgggagagggtagcgcagggtggtttgagagtgagaaatcacgagttcaaaaaacatgatttattcaaaccgtcttcttcggaaggccccacagtgtgtggacagtaaagcttgcttcggcaagctttttgcccggttctcagtgtagcgcctgcgctacccttttt

SEQ ID NO: 1314 - RNA, 172 nt, synthetic construct
  source 1..172: mol_type = other RNA; note chemically_modified_guide_5nt_change_MG71-2_AAVS1_PBS_16
  modified_base 1..3: mod_base = OTHER; note = 2'O-methyl ribonucleotide
  modified_base 1..4: mod_base = OTHER; note = phosphorothioate linkage
  modified_base 170..172: mod_base = OTHER; note = 2'O-methyl ribonucleotide
  modified_base 169..172: mod_base = OTHER; note = phosphorothioate linkage
tctgggagagggtagcgcagggtggtttgagagtgagaaatcacgagttcaaaaaacatgatttattcaaaccgtcttcttcggaaggccccacagtgtgtggacagtaaagcttgcttcggcaagctttttgcccggttctcagtgtagcgcctgcgctaccctctctttt

SEQ ID NO: 1315 - RNA, 176 nt, synthetic construct
  source 1..176: mol_type = other RNA; note chemically_modified_guide_5nt_change_MG71-2_AAVS1_PBS_20
  modified_base 1..3: mod_base = OTHER; note = 2'O-methyl ribonucleotide
  modified_base 1..4: mod_base = OTHER; note = phosphorothioate linkage
  modified_base 174..176: mod_base = OTHER; note = 2'O-methyl ribonucleotide
  modified_base 173..176: mod_base = OTHER; note = phosphorothioate linkage
tctgggagagggtagcgcagggtggtttgagagtgagaaatcacgagttcaaaaaacatgatttattcaaaccgtcttcttcggaaggccccacagtgtgtggacagtaaagcttgcttcggcaagctttttgcccggttctcagtgtagcgcctgcgctaccctctcccagtttt

SEQ ID NO: 1316 - RNA, 135 nt, synthetic construct
  source 1..135: mol_type = other RNA; note = chemically_modified_guide_MG71-2_AAVS1_Guide
  modified_base 1..3: mod_base = OTHER; note = 2'O-methyl ribonucleotide
  modified_base 1..4: mod_base = OTHER; note = phosphorothioate linkage
  modified_base 133..135: mod_base = OTHER; note = 2'O-methyl ribonucleotide
  modified_base 132..135: mod_base = OTHER; note = phosphorothioate linkage
tctgggagagggtagcgcagggtggtttgagagtgagaaatcacgagttcaaaaaacatgatttattcaaaccgtcttcttcggaaggccccacagtgtgtggacagtaaagcttgcttcggcaagctttttttt

SEQ ID NO: 1317 - RNA, 162 nt, synthetic construct
  source 1..162: mol_type = other RNA; note chemically_modified_guide_modified_backbone_MG71-2_AAVS1_PB S_6
  modified_base 1..3: mod_base = OTHER; note = 2'O-methyl ribonucleotide
  modified_base 1..4: mod_base = OTHER; note = phosphorothioate linkage
  modified_base 160..162: mod_base = OTHER; note = 2'O-methyl ribonucleotide
  modified_base 159..162: mod_base = OTHER; note = phosphorothioate linkage
tctgggagagggtagcgcagggtggtttgagagtgagaaatcacgagttcaaaaaacatgatttattcaaaccgtcttcttcggaaggccccacagtgtgtggacagtcccgcttgcttcggcaagcggggtgcccggttctcagtgtagcgcctgcgtttt

SEQ ID NO: 1318 - RNA, 164 nt, synthetic construct
  source 1..164: mol_type = other RNA; note chemically_modified_guide_modified_backbone_MG71-2_AAVS1_PB S_8
  modified_base 1..3: mod_base = OTHER; note = 2'O-methyl ribonucleotide
  modified_base 1..4: mod_base = OTHER; note = phosphorothioate linkage
  modified_base 162..164: mod_base = OTHER; note = 2'O-methyl ribonucleotide
  modified_base 161..164: mod_base = OTHER; note = phosphorothioate linkage
tctgggagagggtagcgcagggtggtttgagagtgagaaatcacgagttcaaaaaacatgatttattcaaaccgtcttcttcggaaggccccacagtgtgtggacagtcccgcttgcttcggcaagcggggtgcccggttctcagtgtagcgcctgcgcttttt

SEQ ID NO: 1319 - RNA, 166 nt, synthetic construct
  source 1..166: mol_type = other RNA; note chemically_modified_guide_modified_backbone_MG71-2_AAVS1_PB S_10
  modified_base 1..3: mod_base = OTHER; note = 2'O-methyl ribonucleotide
  modified_base 1..4: mod_base = OTHER; note = phosphorothioate linkage
  modified_base 164..166: mod_base = OTHER; note = 2'O-methyl ribonucleotide
  modified_base 163..166: mod_base = OTHER; note = phosphorothioate linkage
tctgggagagggtagcgcagggtggtttgagagtgagaaatcacgagttcaaaaaacatgatttattcaaaccgtcttcttcggaaggccccacagtgtgtggacagtcccgcttgcttcggcaagcggggtgcccggttctcagtgtagcgcctgcgctactttt

SEQ ID NO: 1320 - RNA, 169 nt, synthetic construct
  source 1..169: mol_type = other RNA; note chemically_modified_guide_modified_backbone_MG71-2_AAVS1_PB S_13
  modified_base 1..3: mod_base = OTHER; note = 2'O-methyl ribonucleotide
  modified_base 1..4: mod_base = OTHER; note = phosphorothioate linkage
  modified_base 167..169: mod_base = OTHER; note = 2'O-methyl ribonucleotide
  modified_base 166..169: mod_base = OTHER; note = phosphorothioate linkage
tctgggagagggtagcgcagggtggtttgagagtgagaaatcacgagttcaaaaaacatgatttattcaaaccgtcttcttcggaaggccccacagtgtgtggacagtcccgcttgcttcggcaagcggggtgcccggttctcagtgtagcgcctgcgctacccttttt

SEQ ID NO: 1321 - RNA, 172 nt, synthetic construct
  source 1..172: mol_type = other RNA; note chemically_modified_guide_modified_backbone_MG71-2_AAVS1_PB S_16
  modified_base 1..3: mod_base = OTHER; note = 2'O-methyl ribonucleotide
  modified_base 1..4: mod_base = OTHER; note = phosphorothioate linkage
  modified_base 170..172: mod_base = OTHER; note = 2'O-methyl ribonucleotide
  modified_base 169..172: mod_base = OTHER; note = phosphorothioate linkage
tctgggagagggtagcgcagggtggtttgagagtgagaaatcacgagttcaaaaaacatgatttattcaaaccgtcttcttcggaaggccccacagtgtgtggacagtcccgcttgcttcggcaagcggggtgcccggttctcagtgtagcgcctgcgctaccctctctttt

SEQ ID NO: 1322 - RNA, 176 nt, synthetic construct
  source 1..176: mol_type = other RNA; note chemically_modified_guide_modified_backbone_MG71-2_AAVS1_PB S_20
  modified_base 1..3: mod_base = OTHER; note = 2'O-methyl ribonucleotide
  modified_base 1..4: mod_base = OTHER; note = phosphorothioate linkage
  modified_base 174..176: mod_base = OTHER; note = 2'O-methyl ribonucleotide
  modified_base 173..176: mod_base = OTHER; note = phosphorothioate linkage
tctgggagagggtagcgcagggtggtttgagagtgagaaatcacgagttcaaaaaacatgatttattcaaaccgtcttcttcggaaggccccacagtgtgtggacagtcccgcttgcttcggcaagcggggtgcccggttctcagtgtagcgcctgcgctaccctctcccagtttt

SEQ ID NO: 1323 - RNA, 135 nt, synthetic construct
  source 1..135: mol_type = other RNA; note chemically_modified_guide_modified_backbone_MG71-2_AAVS1_Gu ide
  modified_base 1..3: mod_base = OTHER; note = 2'O-methyl ribonucleotide
  modified_base 1..4: mod_base = OTHER; note = phosphorothioate linkage
  modified_base 133..135: mod_base = OTHER; note = 2'O-methyl ribonucleotide
  modified_base 132..135: mod_base = OTHER; note = phosphorothioate linkage
tctgggagagggtagcgcagggtggtttgagagtgagaaatcacgagttcaaaaaacatgatttattcaaaccgtcttcttcggaaggccccacagtgtgtggacagtcccgcttgcttcggcaagcggggtttt

SEQ ID NO: 1324 - RNA, 186 nt, synthetic construct
  source 1..186: mol_type = other RNA; note chemically_modified_guide_MG71-2_AAVS1_insertion_PBS_6
  modified_base 1..3: mod_base = OTHER; note = 2'O-methyl ribonucleotide
  modified_base 1..4: mod_base = OTHER; note = phosphorothioate linkage
  modified_base 184..186: mod_base = OTHER; note = 2'O-methyl ribonucleotide
  modified_base 183..186: mod_base = OTHER; note = phosphorothioate linkage
tctgggagagggtagcgcagggtggtttgagagtgagaaatcacgagttcaaaaaacatgatttattcaaaccgtcttcttcggaaggccccacagtgtgtggacagtaaagcttgcttcggcaagctttttgcccggttctcagtggccaccttatcgtcgtcatccttgtaatccctgcgtttt

SEQ ID NO: 1325 - RNA, 188 nt, synthetic construct
  source 1..188: mol_type = other RNA; note chemically_modified_guide_MG71-2_AAVS1_insertion_PBS_8
  modified_base 1..3: mod_base = OTHER; note = 2'O-methyl ribonucleotide
  modified_base 1..4: mod_base = OTHER; note = phosphorothioate linkage
  modified_base 186..188: mod_base = OTHER; note = 2'O-methyl ribonucleotide
  modified_base 185..188: mod_base = OTHER; note = phosphorothioate linkage
tctgggagagggtagcgcagggtggtttgagagtgagaaatcacgagttcaaaaaacatgatttattcaaaccgtcttcttcggaaggccccacagtgtgtggacagtaaagcttgcttcggcaagctttttgcccggttctcagtggccaccttatcgtcgtcatccttgtaatccctgcgcttttt

SEQ ID NO: 1326 - RNA, 190 nt, synthetic construct
  source 1..190: mol_type = other RNA; note chemically_modified_guide_MG71-2_AAVS1_insertion_PBS_10
  modified_base 1..3: mod_base = OTHER; note = 2'O-methyl ribonucleotide
  modified_base 1..4: mod_base = OTHER; note = phosphorothioate linkage
  modified_base 188..190: mod_base = OTHER; note = 2'O-methyl ribonucleotide
  modified_base 187..190: mod_base = OTHER; note = phosphorothioate linkage
tctgggagagggtagcgcagggtggtttgagagtgagaaatcacgagttcaaaaaacatgatttattcaaaccgtcttcttcggaaggccccacagtgtgtggacagtaaagcttgcttcggcaagctttttgcccggttctcagtggccaccttatcgtcgtcatccttgtaatccctgcgctactttt

SEQ ID NO: 1327 - RNA, 193 nt, synthetic construct
  source 1..193: mol_type = other RNA; note chemically_modified_guide_MG71-2_AAVS1_insertion_PBS_13
  modified_base 1..3: mod_base = OTHER; note = 2'O-methyl ribonucleotide
  modified_base 1..4: mod_base = OTHER; note = phosphorothioate linkage
  modified_base 191..193: mod_base = OTHER; note = 2'O-methyl ribonucleotide
  modified_base 190..193: mod_base = OTHER; note = phosphorothioate linkage
tctgggagagggtagcgcagggtggtttgagagtgagaaatcacgagttcaaaaaacatgatttattcaaaccgtcttcttcggaaggccccacagtgtgtggacagtaaagcttgcttcggcaagctttttgcccggttctcagtggccaccttatcgtcgtcatccttgtaatccctgcgctacccttttt

SEQ ID NO: 1328 - RNA, 196 nt, synthetic construct
  source 1..196: mol_type = other RNA; note chemically_modified_guide_MG71-2_AAVS1_insertion_PBS_16
  modified_base 1..3: mod_base = OTHER; note = 2'O-methyl ribonucleotide
  modified_base 1..4: mod_base = OTHER; note = phosphorothioate linkage
  modified_base 194..196: mod_base = OTHER; note = 2'O-methyl ribonucleotide
  modified_base 193..196: mod_base = OTHER; note = phosphorothioate linkage
tctgggagagggtagcgcagggtggtttgagagtgagaaatcacgagttcaaaaaacatgatttattcaaaccgtcttcttcggaaggccccacagtgtgtggacagtaaagcttgcttcggcaagctttttgcccggttctcagtggccaccttatcgtcgtcatccttgtaatccctgcgctaccctctctttt

SEQ ID NO: 1329 - RNA, 199 nt, synthetic construct
  source 1..199: mol_type = other RNA; note chemically_modified_guide_MG71-2_AAVS1_insertion_PBS_20
  modified_base 1..3: mod_base = OTHER; note = 2'O-methyl ribonucleotide
  modified_base 1..4: mod_base = OTHER; note = phosphorothioate linkage
  modified_base 197..199: mod_base = OTHER; note = 2'O-methyl ribonucleotide
  modified_base 196..199: mod_base = OTHER; note = phosphorothioate linkage
tctgggagagggtagcgcagggtggtttgagagtgagaaatcacgagttcaaaaaacatgatttattcaaaccgtcttcttcggaaggccccacagtgtgtggacagtaaagcttgcttcggcaagctttttgcccggttctcagtggccaccttatcgtcgtcatccttgtaatccctgcgctaccctctcccagttt

SEQ ID NO: 1330 - RNA, 162 nt, synthetic construct
  source 1..162: mol_type = other RNA; note chemically_modified_guide_MG71-2_AAVS1_deletion_15nt_PBS_6
  modified_base 1..3: mod_base = OTHER; note = 2'O-methyl ribonucleotide
  modified_base 1..4: mod_base = OTHER; note = phosphorothioate linkage
  modified_base 160..162: mod_base = OTHER; note = 2'O-methyl ribonucleotide
  modified_base 159..162: mod_base = OTHER; note = phosphorothioate linkage
tctgggagagggtagcgcagggtggtttgagagtgagaaatcacgagttcaaaaaacatgatttattcaaaccgtcttcttcggaaggccccacagtgtgtggacagtaaagcttgcttcggcaagcttttgggggatgcgtgacctgcccgcctgcgtttt

SEQ ID NO: 1331 - RNA, 164 nt, synthetic construct
  source 1..164: mol_type = other RNA; note chemically_modified_guide_MG71-2_AAVS1_deletion_15nt_PBS_8
  modified_base 1..3: mod_base = OTHER; note = 2'O-methyl ribonucleotide
  modified_base 1..4: mod_base = OTHER; note = phosphorothioate linkage
  modified_base 162..164: mod_base = OTHER; note = 2'O-methyl ribonucleotide
  modified_base 161..164: mod_base = OTHER; note = phosphorothioate linkage
tctgggagagggtagcgcagggtggtttgagagtgagaaatcacgagttcaaaaaacatgatttattcaaaccgtcttcttcggaaggccccacagtgtgtggacagtaaagcttgcttcggcaagcttttgggggatgcgtgacctgcccgcctgcgcttttt

SEQ ID NO: 1332 - RNA, 166 nt, synthetic construct
  source 1..166: mol_type = other RNA; note chemically_modified_guide_MG71-2_AAVS1_deletion_15nt_PBS_10
  modified_base 1..3: mod_base = OTHER; note = 2'O-methyl ribonucleotide
  modified_base 1..4: mod_base = OTHER; note = phosphorothioate linkage
  modified_base 164..166: mod_base = OTHER; note = 2'O-methyl ribonucleotide
  modified_base 163..166: mod_base = OTHER; note = phosphorothioate linkage
tctgggagagggtagcgcagggtggtttgagagtgagaaatcacgagttcaaaaaacatgatttattcaaaccgtcttcttcggaaggccccacagtgtgtggacagtaaagcttgcttcggcaagcttttgggggatgcgtgacctgcccgcctgcgctactttt

SEQ ID NO: 1333 - RNA, 169 nt, synthetic construct
  source 1..169: mol_type = other RNA; note chemically_modified_guide_MG71-2_AAVS1_deletion_15nt_PBS_13
  modified_base 1..3: mod_base = OTHER; note = 2'O-methyl ribonucleotide
  modified_base 1..4: mod_base = OTHER; note = phosphorothioate linkage
  modified_base 167..169: mod_base = OTHER; note = 2'O-methyl ribonucleotide
  modified_base 166..169: mod_base = OTHER; note = phosphorothioate linkage
tctgggagagggtagcgcagggtggtttgagagtgagaaatcacgagttcaaaaaacatgatttattcaaaccgtcttcttcggaaggccccacagtgtgtggacagtaaagcttgcttcggcaagcttttgggggatgcgtgacctgcccgcctgcgctacccttttt

SEQ ID NO: 1334 - RNA, 172 nt, synthetic construct
  source 1..172: mol_type = other RNA; note chemically_modified_guide_MG71-2_AAVS1_deletion_15nt_PBS_16
  modified_base 1..3: mod_base = OTHER; note = 2'O-methyl ribonucleotide
  modified_base 1..4: mod_base = OTHER; note = phosphorothioate linkage
  modified_base 170..172: mod_base = OTHER; note = 2'O-methyl ribonucleotide
  modified_base 169..172: mod_base = OTHER; note = phosphorothioate linkage
tctgggagagggtagcgcagggtggtttgagagtgagaaatcacgagttcaaaaaacatgatttattcaaaccgtcttcttcggaaggccccacagtgtgtggacagtaaagcttgcttcggcaagcttttgggggatgcgtgacctgcccgcctgcgctaccctctctttt

SEQ ID NO: 1335 - RNA, 176 nt, synthetic construct
  source 1..176: mol_type = other RNA; note chemically_modified_guide_MG71-2_AAVS1_deletion_15nt_PBS_20
  modified_base 1..3: mod_base = OTHER; note = 2'O-methyl ribonucleotide
  modified_base 1..4: mod_base = OTHER; note = phosphorothioate linkage
  modified_base 174..176: mod_base = OTHER; note = 2'O-methyl ribonucleotide
  modified_base 173..176: mod_base = OTHER; note = phosphorothioate linkage
tctgggagagggtagcgcagggtggtttgagagtgagaaatcacgagttcaaaaaacatgatttattcaaaccgtcttcttcggaaggccccacagtgtgtggacagtaaagcttgcttcggcaagcttttgggggatgcgtgacctgcccgcctgcgctaccctctcccagtttt

SEQ ID NO: 1336 - RNA, 162 nt, synthetic construct
  source 1..162: mol_type = other RNA; note = chemically_modified_guide_MG71-2_AAVS1_G-to-T_PBS_6
  modified_base 1..3: mod_base = OTHER; note = 2'O-methyl ribonucleotide
  modified_base 1..4: mod_base = OTHER; note = phosphorothioate linkage
  modified_base 160..162: mod_base = OTHER; note = 2'O-methyl ribonucleotide
  modified_base 159..162: mod_base = OTHER; note = phosphorothioate linkage
tctgggagagggtagcgcagggtggtttgagagtgagaaatcacgagttcaaaaaacatgatttattcaaaccgtcttcttcggaaggccccacagtgtgtggacagtaaagcttgcttcggcaagctttttgcccggttctcagtggacaccctgcgtttt

SEQ ID NO: 1337 - RNA, 164 nt, synthetic construct
  source 1..164: mol_type = other RNA; note = chemically_modified_guide_MG71-2_AAVS1G-to-T_PBS_8
  modified_base 1..3: mod_base = OTHER; note = 2'O-methyl ribonucleotide
  modified_base 1..4: mod_base = OTHER; note = phosphorothioate linkage
  modified_base 162..164: mod_base = OTHER; note = 2'O-methyl ribonucleotide
  modified_base 161..164: mod_base = OTHER; note = phosphorothioate linkage
tctgggagagggtagcgcagggtggtttgagagtgagaaatcacgagttcaaaaaacatgatttattcaaaccgtcttcttcggaaggccccacagtgtgtggacagtaaagcttgcttcggcaagctttttgcccggttctcagtggacaccctgcgcttttt

SEQ ID NO: 1338 - RNA, 166 nt, synthetic construct
  source 1..166: mol_type = other RNA; note = chemically_modified_guide_MG71-2_AAVS1_G-to-T_PBS_10
  modified_base 1..3: mod_base = OTHER; note = 2'O-methyl ribonucleotide
  modified_base 1..4: mod_base = OTHER; note = phosphorothioate linkage
  modified_base 164..166: mod_base = OTHER; note = 2'O-methyl ribonucleotide
  modified_base 163..166: mod_base = OTHER; note = phosphorothioate linkage
tctgggagagggtagcgcagggtggtttgagagtgagaaatcacgagttcaaaaaacatgatttattcaaaccgtcttcttcggaaggccccacagtgtgtggacagtaaagcttgcttcggcaagctttttgcccggttctcagtggacaccctgcgctactttt

SEQ ID NO: 1339 - RNA, 169 nt, synthetic construct
  source 1..169: mol_type = other RNA; note = chemically_modified_guide_MG71-2_AAVS1G-to-T_PBS_13
  modified_base 1..3: mod_base = OTHER; note = 2'O-methyl ribonucleotide
  modified_base 1..4: mod_base = OTHER; note = phosphorothioate linkage
  modified_base 167..169: mod_base = OTHER; note = 2'O-methyl ribonucleotide
  modified_base 166..169: mod_base = OTHER; note = phosphorothioate linkage
tctgggagagggtagcgcagggtggtttgagagtgagaaatcacgagttcaaaaaacatgatttattcaaaccgtcttcttcggaaggccccacagtgtgtggacagtaaagcttgcttcggcaagctttttgcccggttctcagtggacaccctgcgctacccttttt

SEQ ID NO: 1340 - RNA, 172 nt, synthetic construct
  source 1..172: mol_type = other RNA; note = chemically_modified_guide_MG71-2_AAVS1_G-to-T_PBS_16
  modified_base 1..3: mod_base = OTHER; note = 2'O-methyl ribonucleotide
  modified_base 1..4: mod_base = OTHER; note = phosphorothioate linkage
  modified_base 170..172: mod_base = OTHER; note = 2'O-methyl ribonucleotide
  modified_base 169..172: mod_base = OTHER; note = phosphorothioate linkage
tctgggagagggtagcgcagggtggtttgagagtgagaaatcacgagttcaaaaaacatgatttattcaaaccgtcttcttcggaaggccccacagtgtgtggacagtaaagcttgcttcggcaagctttttgcccggttctcagtggacaccctgcgctaccctctctttt

SEQ ID NO: 1341 - RNA, 176 nt, synthetic construct
  source 1..176: mol_type = other RNA; note = chemically_modified_guide_MG71-2_AAVS1_G-to-T_PBS_20
  modified_base 1..3: mod_base = OTHER; note = 2'O-methyl ribonucleotide
  modified_base 1..4: mod_base = OTHER; note = phosphorothioate linkage
  modified_base 174..176: mod_base = OTHER; note = 2'O-methyl ribonucleotide
  modified_base 173..176: mod_base = OTHER; note = phosphorothioate linkage
tctgggagagggtagcgcagggtggtttgagagtgagaaatcacgagttcaaaaaacatgatttattcaaaccgtcttcttcggaaggccccacagtgtgtggacagtaaagcttgcttcggcaagctttttgcccggttctcagtggacaccctgcgctaccctctcccagtttt

SEQ ID NO: 1342 - DNA, 40 bp, synthetic construct
  source 1..40: mol_type = other DNA; note = MG71-2n_AAVS1_forward_primer
gctcttccgatctnnnnnactgcttctcctcttgggaagt

SEQ ID NO: 1343 - DNA, 41 bp, synthetic construct
  source 1..41: mol_type = other DNA; note = MG71-2n_AAVS1_reverse_primer
gctcttccgatctnnnnnatttcctggagccatctctctcc

SEQ ID NO: 1344 - DNA, 250 bp, synthetic construct
  source 1..250: mol_type = other DNA; note = MG71-2n_AAVS1_target_amplified_ngs
actgcttctcctcttgggaagtgtaaggaagctgcagcaccaggatcagtgaaacgcaccagacggccgcgtcagagcagctcaggttctgggagagggtagcgcagggtggccactgagaaccgggcaggtcacgcatcccccccttccctcccaccccctgccaagctctccctcccaggatcctctctggctccatcgtaagcaaaccttagaggttctggcaaggagagagatggctccaggaaat

SEQ ID NO: 1345 - RNA, 178 nt, Escherichia coli
  source 1..178: mol_type = genomic RNA; note = Ec86 WT ncRNA
ggatgcgcacccttagcgagaggtttatcattaaggtcaacctctggatgttgtttcggcatcctgcattgaatctgagttactgtctgttttccttgttggaacggagagcatcgcctgatgctctccgagccaaccaggaaacccgttttttctgacgtaagggtgcgcaactttc

SEQ ID NO: 1346 - RNA, 312 nt, synthetic construct
  source 1..312: mol_type = other RNA; note = Ec86_LE40REv1 ncRNA
ggatgcgcacccttagcgagaggtttatcattaaggtcaacctctggatgttgtttcggcatcctgcattgaatctgagttactgtctgttttccttgtcattaggcaaatttgttgacatactccccatagctaaagctaggggattctagctaaagcatgaggaacataacttggtatcgtgcatgtagcgttcaagggctatagaaggcgtttcgccttgtatccccatagctaaaagctaggggctttaaggcgttagttttggtaacaggaaacccgttttttctgacgtaagggtgcgcaactttc

SEQ ID NO: 1347 - RNA, 326 nt, synthetic construct
  source 1..326: mol_type = other RNA; note = Ec86_LE40REv2 ncRNA
ggatgcgcacccttagcgagaggtttatcattaaggtcaacctctggatgttgtttcggcatcctgcattgaatctgagttactgtctgttttccttgttggaagtcattaggcaaatttgttgacatactccccatagctaaagctaggggattctagctaaagcatgaggaacataacttggtatcgtgcatgtagcgttcaagggctatagaaggcgtttcgccttgtatccccatagctaaaagctaggggctttaaggcgttagttttggtaaagccaaccaggaaacccgttttttctgacgtaagggtgcgcaactttc

SEQ ID NO: 1348 - RNA, 344 nt, synthetic construct
  source 1..344: mol_type = other RNA; note = Ec86_LE40REv3 ncRNA
ggatgcgcacccttagcgagaggtttatcattaaggtcaacctctggatgttgtttcggcatcctgcattgaatctgagttactgtctgttttccttgttggaacggagagcagtcattaggcaaatttgttgacatactccccatagctaaagctaggggattctagctaaagcatgaggaacataacttggtatcgtgcatgtagcgttcaagggctatagaaggcgtttcgccttgtatccccatagctaaaagctaggggctttaaggcgttagttttggtaatgctctccgagccaaccaggaaacccgttttttctgacgtaagggtgcgcaactttc

SEQ ID NO: 1349 - RNA, 472 nt, synthetic construct
  source 1..472: mol_type = other RNA; note = Ec86_LE200REv1 ncRNA
ggatgcgcacccttagcgagaggtttatcattaaggtcaacctctggatgttgtttcggcatcctgcattgaatctgagttactgtctgttttccttgtcattaggcaaatttgttgacatactccccatagctaaagctaggggattctagctaaagcatgaggaattagaaaaactcatcgagcatcaaatgaaactgcaatttattcatatcaggattatcaataccatatttttgaaaaagccgtttctgtaatgaaggagaaaactcaccgaggcagttccataggatggcaagatcctggtatcggtctgcgattccgactcgtccaacatcaatacaacctattaatttcccctcgtcaaaaggcgtttcgccttgtatccccatagctaaaagctaggggctttaaggcgttagttttggtaacaggaaacccgttttttctgacgtaagggtgcgcaactttc

SEQ ID NO: 1350 - RNA, 504 nt, synthetic construct
  source 1..504: mol_type = other RNA; note = Ec86_LE200REv3 ncRNA
ggatgcgcacccttagcgagaggtttatcattaaggtcaacctctggatgttgtttcggcatcctgcattgaatctgagttactgtctgttttccttgttggaacggagagcagtcattaggcaaatttgttgacatactccccatagctaaagctaggggattctagctaaagcatgaggaattagaaaaactcatcgagcatcaaatgaaactgcaatttattcatatcaggattatcaataccatatttttgaaaaagccgtttctgtaatgaaggagaaaactcaccgaggcagttccataggatggcaagatcctggtatcggtctgcgattccgactcgtccaacatcaatacaacctattaatttcccctcgtcaaaaggcgtttcgccttgtatccccatagctaaaagctaggggctttaaggcgttagttttggtaatgctctccgagccaaccaggaaacccgttttttctgacgtaagggtgcgcaactttc

SEQ ID NO: 1351 - RNA, 772 nt, synthetic construct
  source 1..772: mol_type = other RNA; note = Ec86_LE500REv1 ncRNA
ggatgcgcacccttagcgagaggtttatcattaaggtcaacctctggatgttgtttcggcatcctgcattgaatctgagttactgtctgttttccttgtcattaggcaaatttgttgacatactccccatagctaaagctaggggattctagctaaagcatgaggaattagaaaaactcatcgagcatcaaatgaaactgcaatttattcatatcaggattatcaataccatatttttgaaaaagccgtttctgtaatgaaggagaaaactcaccgaggcagttccataggatggcaagatcctggtatcggtctgcgattccgactcgtccaacatcaatacaacctattaatttcccctcgtcaaaaataaggttatcaagtgagaaatcaccatgagtgacgactgaatccggtgagaatggcaaaagtttatgcatttctttccagacttgttcaacaggccagccattacgctcgtcatcaaaatcactcgcatcaaccaaaccgttattcattcgtgattgcgcctgagcgagacgaaatacgcggtcgctgttaaaaggacaattacaaacaggaatcgaatgcaaccggcgcaggaacactgccagcgcatcaacaatattttcacctgaatcaggatattcttctaatacctggaatgaaggcgtttcgccttgtatccccatagctaaaagctaggggctttaaggcgttagttttggtaacaggaaacccgttttttctgacgtaagggtgcgcaactttc

SEQ ID NO: 1352 - RNA, 786 nt, synthetic construct
  source 1..786: mol_type = other RNA; note = Ec86_LE500REv2 ncRNA
ggatgcgcacccttagcgagaggtttatcattaaggtcaacctctggatgttgtttcggcatcctgcattgaatctgagttactgtctgttttccttgttggaagtcattaggcaaatttgttgacatactccccatagctaaagctaggggattctagctaaagcatgaggaattagaaaaactcatcgagcatcaaatgaaactgcaatttattcatatcaggattatcaataccatatttttgaaaaagccgtttctgtaatgaaggagaaaactcaccgaggcagttccataggatggcaagatcctggtatcggtctgcgattccgactcgtccaacatcaatacaacctattaatttcccctcgtcaaaaataaggttatcaagtgagaaatcaccatgagtgacgactgaatccggtgagaatggcaaaagtttatgcatttctttccagacttgttcaacaggccagccattacgctcgtcatcaaaatcactcgcatcaaccaaaccgttattcattcgtgattgcgcctgagcgagacgaaatacgcggtcgctgttaaaaggacaattacaaacaggaatcgaatgcaaccggcgcaggaacactgccagcgcatcaacaatattttcacctgaatcaggatattcttctaatacctggaatgaaggcgtttcgccttgtatccccatagctaaaagctaggggctttaaggcgttagttttggtaaagccaaccaggaaacccgttttttctgacgtaagggtgcgcaactttc

SEQ ID NO: 1353 - RNA, 804 nt, synthetic construct
  source 1..804: mol_type = other RNA; note = Ec86_LE500REv3 ncRNA
ggatgcgcacccttagcgagaggtttatcattaaggtcaacctctggatgttgtttcggcatcctgcattgaatctgagttactgtctgttttccttgttggaacggagagcagtcattaggcaaatttgttgacatactccccatagctaaagctaggggattctagctaaagcatgaggaattagaaaaactcatcgagcatcaaatgaaactgcaatttattcatatcaggattatcaataccatatttttgaaaaagccgtttctgtaatgaaggagaaaactcaccgaggcagttccataggatggcaagatcctggtatcggtctgcgattccgactcgtccaacatcaatacaacctattaatttcccctcgtcaaaaataaggttatcaagtgagaaatcaccatgagtgacgactgaatccggtgagaatggcaaaagtttatgcatttctttccagacttgttcaacaggccagccattacgctcgtcatcaaaatcactcgcatcaaccaaaccgttattcattcgtgattgcgcctgagcgagacgaaatacgcggtcgctgttaaaaggacaattacaaacaggaatcgaatgcaaccggcgcaggaacactgccagcgcatcaacaatattttcacctgaatcaggatattcttctaatacctggaatgaaggcgtttcgccttgtatccccatagctaaaagctaggggctttaaggcgttagttttggtaatgctctccgagccaaccaggaaacccgttttttctgacgtaagggtgcgcaactttc

SEQ ID NO: 1354 - DNA, 21 bp, synthetic construct
  source 1..21: mol_type = other DNA; note = KT123 qPCR Primer - WT Ec86
aaaaacgggtttcctggttgg

SEQ ID NO: 1355 - DNA, 25 bp, synthetic construct
  source 1..25: mol_type = other DNA; note = KT124 qPCR Primer - WT Ec86
gttactgtctgttttccttgttgga

SEQ ID NO: 1356 - DNA, 21 bp, synthetic construct
  source 1..21: mol_type = other DNA; note = KT125 qPCR Primer - 40nt cargo
taacgccttaaagcccctagc

SEQ ID NO: 1357 - DNA, 23 bp, synthetic construct
  source 1..23: mol_type = other DNA; note = KT126 qPCR Primer - 40nt cargo
ttgttgacatactccccatagct

SEQ ID NO: 1358 - DNA, 21 bp, synthetic construct
  source 1..21: mol_type = other DNA; note = KT140 qPCR Primer - 200/500nt cargo
aaggagaaaactcaccgaggc

SEQ ID NO: 1359 - DNA, 20 bp, synthetic construct
  source 1..20: mol_type = other DNA; note = KT141 qPCR Primer - 200/500nt cargo
tgatgttggacgagtcggaa

SEQ ID NO: 1360 - DNA, 25 bp, synthetic construct
  source 1..25: mol_type = other DNA; note = KT114 (Kanamycin) Primer for chimeric product
tgacgaggggaaattaataggttgt

SEQ ID NO: 1361 - DNA, 35 bp, synthetic construct
  source 1..35: mol_type = other DNA; note = LA125 (ssDNA-ultramer-target) Primer for chimeric product
gctcttccgatctnnnnnggtgttggcgggtgtcg

SEQ ID NO: 1362 - RNA, 346 nt, synthetic construct
  source 1..346: mol_type = other RNA; note = Ec86_ncRNA_200kan-v1
ggatgcgcacccttagcgagaggtttatcattaaggtcaacctctggatgttgtttcggcatcctgcattgaatctgagttactgtctgttttccttttgattagaaaaactcatcgagcatcaaatgaaactgcaatttattcatatcaggattatcaataccatatttttgaaaaagccgtttctgtaatgaaggagaaaactcaccgaggcagttccataggatggcaagatcctggtatcggtctgcgattccgactcgtccaacatcaatacaacctattaatttcccctcgtcaagtaacaggaaacccgttttttctgacgtaagggtgcgcaactttc

SEQ ID NO: 1363 - RNA, 317 nt, synthetic construct
  source 1..317: mol_type = other RNA; note = MG154-1_ncRNA_200kan-v1
ggtaggatactagctcccccgcgtttcgcgggtcaggtaagttgtatgctcgcctgtggctcgaggctgacagatcctttgattagaaaaactcatcgagcatcaaatgaaactgcaatttattcatatcaggattatcaataccatatttttgaaaaagccgtttctgtaatgaaggagaaaactcaccgaggcagttccataggatggcaagatcctggtatcggtctgcgattccgactcgtccaacatcaatacaacctattaatttcccctcgtcaagtaaattactgtcagcaatactgtgtagtatcctt

SEQ ID NO: 1364 - RNA, 336 nt, synthetic construct
  source 1..336: mol_type = other RNA; note = MG154-2_ncRNA_200kan-v1
ggttctcttagactatacataggtttcctatgttgattcatacatggttataaatatgtaaataaaaggcgcaaaaccggtttttgattagaaaaactcatcgagcatcaaatgaaactgcaatttattcatatcaggattatcaataccatatttttgaaaaagccgtttctgtaatgaaggagaaaactcaccgaggcagttccataggatggcaagatcctggtatcggtctgcgattccgactcgtccaacatcaatacaacctattaatttcccctcgtcaagtaatctcccggtgttgccatcataatttacaacaattgtaagagaatt

SEQ ID NO: 1365 - RNA, 309 nt, synthetic construct
  source 1..309: mol_type = other RNA; note = MG154-2_ncRNA_200kan-v2
ggttctcttagactatacataggtttcctatgttgattcatacatggttataaatatgtaaataaaaggcttgattagaaaaactcatcgagcatcaaatgaaactgcaatttattcatatcaggattatcaataccatatttttgaaaaagccgtttctgtaatgaaggagaaaactcaccgaggcagttccataggatggcaagatcctggtatcggtctgcgattccgactcgtccaacatcaatacaacctattaatttcccctcgtcaagtaacatcataatttacaacaattgtaagagaatt

SEQ ID NO: 1366 - RNA, 335 nt, synthetic construct
  source 1..335: mol_type = other RNA; note = MG155-1_ncRNA_200kan-v1
ggacgaacaatcacatgacatctgcaggggacagccgggattaaccgggattgtccgggatcagacggaaaagagccgcagttccaagggttgattagaaaaactcatcgagcatcaaatgaaactgcaatttattcatatcaggattatcaataccatatttttgaaaaagccgtttctgtaatgaaggagaaaactcaccgaggcagttccataggatggcaagatcctggtatcggtctgcgattccgactcgtccaacatcaatacaacctattaatttcccctcgtcaagtaaggcggcgcggcattcagtgccatttgattgttcgcag

SEQ ID NO: 1367 - RNA, 346 nt, synthetic construct
  source 1..346: mol_type = other RNA; note = MG155-1_ncRNA_200kan-v2
ggacgaacaatcacatgacatctgcaggggacagccgggattaaccgggattgtccgggatcagacggaaaagagccgcagttccaaggggctaggcgggccagcgttgattagaaaaactcatcgagcatcaaatgaaactgcaatttattcatatcaggattatcaataccatatttttgaaaaagccgtttctgtaatgaaggagaaaactcaccgaggcagttccataggatggcaagatcctggtatcggtctgcgattccgactcgtccaacatcaatacaacctattaatttcccctcgtcaagtaacgcggcattcagtgccatttgattgttcgcag

SEQ ID NO: 1368 - RNA, 333 nt, synthetic construct
  source 1..333: mol_type = other RNA; note = MG155-2_ncRNA_200kan-v1
ggatctttacgcgattaaagccttatggcttagccgggtgtttagccaggctcgtttgattggatcgttttatcccgcagaatgcctctgcttgattagaaaaactcatcgagcatcaaatgaaactgcaatttattcatatcaggattatcaataccatatttttgaaaaagccgtttctgtaatgaaggagaaaactcaccgaggcagttccataggatggcaagatcctggtatcggtctgcgattccgactcgtccaacatcaatacaacctattaatttcccctcgtcaagtaaacagaggcattctgcggttggtcttggtaaagat

SEQ ID NO: 1369 - RNA, 391 nt, synthetic construct
  source 1..391: mol_type = other RNA; note = MG155-3_ncRNA-not-trimmed-200kan-v1
ggtatcataatgtaaactacattggctctttagcttaggacgaaattcgtctagtcgggtgtttagccagactctaatttattgaacgactttatggttgcgatatgttttgattagaaaaactcatcgagcatcaaatgaaactgcaatttattcatatcaggattatcaataccatatttttgaaaaagccgtttctgtaatgaaggagaaaactcaccgaggcagttccataggatggcaagatcctggtatcggtctgcgattccgactcgtccaacatcaatacaacctattaatttcccctcgtcaagtaaaacatatcgcttcctctagtaaagagcaaagcccaagagcattgttcttgggcttttttgtttgtggactaaag

SEQ ID NO: 1370 - RNA, 337 nt, synthetic construct
  source 1..337: mol_type = other RNA; note = MG155-3_ncRNA-trimmed_200kan-v1
ggctctttagcttaggacgaaattcgtctagtcgggtgtttagccagactctaatttattgaacgactttatggttgcgatatgttcgcaaccgttgattagaaaaactcatcgagcatcaaatgaaactgcaatttattcatatcaggattatcaataccatatttttgaaaaagccgtttctgtaatgaaggagaaaactcaccgaggcagttccataggatggcaagatcctggtatcggtctgcgattccgactcgtccaacatcaatacaacctattaatttcccctcgtcaagtaaaggttgcgaacatatcgcttcctctagtaaagagc

SEQ ID NO: 1371 - RNA, 387 nt, synthetic construct
  source 1..387: mol_type = other RNA; note = MG155-4_ncRNA-not-trimmed-200kan-v1
ggcacctgtgtacgataagctttatcaactctttagcgtcggacgtattacgtctagtcgggtgtttagccagactctaatttattgagcgcatttggggttgcgaaagtgttgattagaaaaactcatcgagcatcaaatgaaactgcaatttattcatatcaggattatcaataccatatttttgaaaaagccgtttctgtaatgaaggagaaaactcaccgaggcagttccataggatggcaagatcctggtatcggtctgcgattccgactcgtccaacatcaatacaacctattaatttcccctcgtcaagtaaaactttcgcttcctccagtaaagagttaaacccggcagatttaaccctgccggtttttttcacaggtg

SEQ ID NO: 1372 - RNA, 322 nt, synthetic construct
  source 1..322: mol_type = other RNA; note = MG155-4_ncRNA-trimmed-200kan-v1
ggaactctttagcgtcggacgtattacgtctagtcgggtgtttagccagactctaatttattgagcgcatttggggttgcgaaagtgttgattagaaaaactcatcgagcatcaaatgaaactgcaatttattcatatcaggattatcaataccatatttttgaaaaagccgtttctgtaatgaaggagaaaactcaccgaggcagttccataggatggcaagatcctggtatcggtctgcgattccgactcgtccaacatcaatacaacctattaatttcccctcgtcaagtaaaactttcgcttcctccagtaaagagtt

SEQ ID NO: 1373 - RNA, 320 nt, synthetic construct
  source 1..320: mol_type = other RNA; note = MG155-5_ncRNA_200kan-v1
ggctctttagttttggacagttattttgtctagtcgggtgttaagccagactgtaatttatcgaacgacattcgttgcgatcccattgattagaaaaactcatcgagcatcaaatgaaactgcaatttattcatatcaggattatcaataccatatttttgaaaaagccgtttctgtaatgaaggagaaaactcaccgaggcagttccataggatggcaagatcctggtatcggtctgcgattccgactcgtccaacatcaatacaacctattaatttcccctcgtcaagtaacgggatcgcggcctctgagtaaagagc

SEQ ID NO: 1374 - RNA, 357 nt, synthetic construct
  source 1..357: mol_type = other RNA; note = MG156-1_ncRNA_200kan-v1
ggtaagcagaaacaatagcagaactgaaaggatgaaatccgtttcagcaggggagcgagtcgctgtccggtatggaaaagagaaacatgaaacgggaagatgctgcgttgattagaaaaactcatcgagcatcaaatgaaactgcaatttattcatatcaggattatcaataccatatttttgaaaaagccgtttctgtaatgaaggagaaaactcaccgaggcagttccataggatggcaagatcctggtatcggtctgcgattccgactcgtccaacatcaatacaacctattaatttcccctcgtcaagtaacttcgcacttccggtatcgatgtattgtattgtttctgcttt

SEQ ID NO: 1375 - RNA, 332 nt, synthetic construct
  source 1..332: mol_type = other RNA; note = MG156-2_ncRNA_200kan-v1
gggcaatagccataccggatcattttccggcccgtcggcgagtcgccgacggggactgttgacctatccatcagaccgcaatctgctccttgattagaaaaactcatcgagcatcaaatgaaactgcaatttattcatatcaggattatcaataccatatttttgaaaaagccgtttctgtaatgaaggagaaaactcaccgaggcagttccataggatggcaagatcctggtatcggtctgcgattccgactcgtccaacatcaatacaacctattaatttcccctcgtcaagtaatgcgcatcttacggtatcgcttttggtattgcccc

SEQ ID NO: 1376 - RNA, 369 nt, synthetic construct
  source 1..369: mol_type = other RNA; note = MG157-1_ncRNA_not-trimmed-200kan-v1
ggagaagagttcttagccagaccaagctgggttgccattttggtctgagcggtgattcgccgctctagatgaaaactttggtttatcgtattaatgtttaattgctttgattagaaaaactcatcgagcatcaaatgaaactgcaatttattcatatcaggattatcaataccatatttttgaaaaagccgtttctgtaatgaaggagaaaactcaccgaggcagttccataggatggcaagatcctggtatcggtctgcgattccgactcgtccaacatcaatacaacctattaatttcccctcgtcaagtaacgcattaaacattaacaattatttttgaagtaagaactctacttatttaagaaat

SEQ ID NO: 1377 - RNA, 351 nt, synthetic construct
  source 1..351: mol_type = other RNA; note = MG157-1_ncRNA-trimmed-200kan-v1
ggagagttcttagccagaccaagctgggttgccattttggtctgagcggtgattcgccgctctagatgaaaactttggtttatcgtattaatgtttaattgctttgattagaaaaactcatcgagcatcaaatgaaactgcaatttattcatatcaggattatcaataccatatttttgaaaaagccgtttctgtaatgaaggagaaaactcaccgaggcagttccataggatggcaagatcctggtatcggtctgcgattccgactcgtccaacatcaatacaacctattaatttcccctcgtcaagtaacgcattaaacattaacaattatttttgaagtaagaactct

SEQ ID NO: 1378 - RNA, 320 nt, synthetic construct
  source 1..320: mol_type = other RNA; note = MG157-1_ncRNA-trimmed-200kan-v2
ggagagttcttagccagaccaagctgggttgccattttggtctgagcggtgattcgccgctctagatgaaaactttggtttatcgtattgattagaaaaactcatcgagcatcaaatgaaactgcaatttattcatatcaggattatcaataccatatttttgaaaaagccgtttctgtaatgaaggagaaaactcaccgaggcagttccataggatggcaagatcctggtatcggtctgcgattccgactcgtccaacatcaatacaacctattaatttcccctcgtcaagtaacaattatttttgaagtaagaactct

SEQ ID NO: 1379 - RNA, 386 nt, synthetic construct
  source 1..386: mol_type = other RNA; note = MG157-2_ncRNA_200kan-v1
ggacaacaccgttatccttagatgctactactttagtataaacgtgcacaatatctatttatatgaaagtagtgggaagtggttcgctttccgaggtgctatgtcaggactatatttaatgaagtaagcgtttgattagaaaaactcatcgagcatcaaatgaaactgcaatttattcatatcaggattatcaataccatatttttgaaaaagccgtttctgtaatgaaggagaaaactcaccgaggcagttccataggatggcaagatcctggtatcggtctgcgattccgactcgtccaacatcaatacaacctattaatttcccctcgtcaagtaaccacttacttcatcaaaaggattaaaggtaaggaggacggtgttgtc

SEQ ID NO: 1380 - RNA, 352 nt, synthetic construct
  source 1..352: mol_type = other RNA; note = MG157-3_ncRNA_200kan-v1
ggagttctttttagacgcgaagtatattatagtaatgtattagcgagtggatgttgtttcggcatccgagtttaaaactgaactttgtcatcgcaattctaaaggttgattagaaaaactcatcgagcatcaaatgaaactgcaatttattcatatcaggattatcaataccatatttttgaaaaagccgtttctgtaatgaaggagaaaactcaccgaggcagttccataggatggcaagatcctggtatcggtctgcgattccgactcgtccaacatcaatacaacctattaatttcccctcgtcaagtaacctttagattcactcaagaattgtggagtaaaaagaact

SEQ ID NO: 1381 - RNA, 349 nt, synthetic construct
  source 1..349: mol_type = other RNA; note = MG157-4_ncRNA_200kan-v1
ggaaagttctttttagacgcttttttattatgtatgtaataaacaaaaagcgagtgagtgttgttccgacactcgagttttaaacttagatactatcatcgcaaatttgattagaaaaactcatcgagcatcaaatgaaactgcaatttattcatatcaggattatcaataccatatttttgaaaaagccgtttctgtaatgaaggagaaaactcaccgaggcagttccataggatggcaagatcctggtatcggtctgcgattccgactcgtccaacatcaatacaacctattaatttcccctcgtcaagtaatttcactcaactattgagaagtattaagaactttc

SEQ ID NO: 1382 - RNA, 369 nt, synthetic construct
  source 1..369: mol_type = other RNA; note = MG157-4_ncRNA_200kan-v2
ggaaagttctttttagacgcttttttattatgtatgtaataaacaaaaagcgagtgagtgttgttccgacactcgagttttaaacttagatactatcatcgcaaattttaagtgcattgattagaaaaactcatcgagcatcaaatgaaactgcaatttattcatatcaggattatcaataccatatttttgaaaaagccgtttctgtaatgaaggagaaaactcaccgaggcagttccataggatggcaagatcctggtatcggtctgcgattccgactcgtccaacatcaatacaacctattaatttcccctcgtcaagtaacacacttaaatttcactcaactattgagaagtattaagaactttc

SEQ ID NO: 1383 - RNA, 354 nt, synthetic construct
  source 1..354: mol_type = other RNA; note = MG157-5_ncRNA_200kan-v1
ggtgctgtctccttagattcacggatctttttagtttgtgcacaatatactaaaattgttttgtgtgggggatgattagtcctcttataagaaagtactactcatgaattgttcttgattagaaaaactcatcgagcatcaaatgaaactgcaatttattcatatcaggattatcaataccatatttttgaaaaagccgtttctgtaatgaaggagaaaactcaccgaggcagttccataggatggcaagatcctggtatcggtctgcgattccgactcgtccaacatcaatacaacctattaatttcccctcgtcaagtaacaaaatagttgatagggtaaggagacagcatt

SEQ ID NO: 1384 - RNA, 370 nt, synthetic construct
  source 1..370: mol_type = other RNA; note = MG157-5_ncRNA_200kan-v2
ggtgctgtctccttagattcacggatctttttagtttgtgcacaatatactaaaattgttttgtgtgggggatgattagtcctcttataagaaagtactactcatgaattgttcttttgtaattgattagaaaaactcatcgagcatcaaatgaaactgcaatttattcatatcaggattatcaataccatatttttgaaaaagccgtttctgtaatgaaggagaaaactcaccgaggcagttccataggatggcaagatcctggtatcggtctgcgattccgactcgtccaacatcaatacaacctattaatttcccctcgtcaagtaatcacaaaacaaaatagttgatagggtaaggagacagcatt

SEQ ID NO: 1385 - RNA, 408 nt, synthetic construct
  source 1..408: mol_type = other RNA; note = MG158-1_ncRNA-trimmed_200kan-v1
ggaccttggttttcagaaccaggtagggagtccctatctttattaatgttatttaatagctatgaatataagctctgcttatattcataccaagtgctagtcgcacttggtatgataaccttacgaaatatttaggatatttctaaggttatcaaagtgaaatgaaagaagcagatgttgattagaaaaactcatcgagcatcaaatgaaactgcaatttattcatatcaggattatcaataccatatttttgaaaaagccgtttctgtaatgaaggagaaaactcaccgaggcagttccataggatggcaagatcctggtatcggtctgcgattccgactcgtccaacatcaatacaacctattaatttcccctcgtcaagtaacatctgaacgtgaaaaccaaggt

SEQ ID NO: 1386 - RNA, 418 nt, synthetic construct
  source 1..418: mol_type = other RNA; note = MG158-1_ncRNA-trimmed_200kan-v2
ggaccttggttttcagaaccaggtagggagtccctatctttattaatgttatttaatagctatgaatataagctctgcttatattcataccaagtgctagtcgcacttggtatgataaccttacgaaatatttaggatatttctaaggttatcaaagtgaaatgaaagaagcagatgttgaattgattagaaaaactcatcgagcatcaaatgaaactgcaatttattcatatcaggattatcaataccatatttttgaaaaagccgtttctgtaatgaaggagaaaactcaccgaggcagttccataggatggcaagatcctggtatcggtctgcgattccgactcgtccaacatcaatacaacctattaatttcccctcgtcaagtaacccaacatctgaacgtgaaaaccaaggt

SEQ ID NO: 1387 - RNA, 357 nt, synthetic construct
  source 1..357: mol_type = other RNA; note = MG159-1_ncRNA_200kan-v1
ggtggaggagtcgaatccgttagccagcgctccggcgcaagggcggcgtcgcgccgtccgggcacaatcactggccactctccacaaggtaggctgttctttgattagaaaaactcatcgagcatcaaatgaaactgcaatttattcatatcaggattatcaataccatatttttgaaaaagccgtttctgtaatgaaggagaaaactcaccgaggcagttccataggatggcaagatcctggtatcggtctgcgattccgactcgtccaacatcaatacaacctattaatttcccctcgtcaagtaagtgagcctaccgtgtcccatgatggtagtagcggcctcgactcctccgc

SEQ ID NO: 1388 - RNA, 374 nt, synthetic construct
  source 1..374: mol_type = other RNA; note = MG159-1_ncRNA_200kan-v2
ggtggaggagtcgaatccgttagccagcgctccggcgcaagggcggcgtcgcgccgtccgggcacaatcactggccactctccacaaggtaggctgttcttggtctgctttgattagaaaaactcatcgagcatcaaatgaaactgcaatttattcatatcaggattatcaataccatatttttgaaaaagccgtttctgtaatgaaggagaaaactcaccgaggcagttccataggatggcaagatcctggtatcggtctgcgattccgactcgtccaacatcaatacaacctattaatttcccctcgtcaagtaagcagaccggtgagcctaccgtgtcccatgatggtagtagcggcctcgactcctccgc

SEQ ID NO: 1389 - RNA, 362 nt, synthetic construct
  source 1..362: mol_type = other RNA; note = MG159-2_ncRNA_200kan-v1
ggcggaggaatcggaatcgttggcctgtacctcggtaaacgggcggcgatgcgccttccaggcacgatattcgatcaatcaccacaaggtaggctatgcgtttgattagaaaaactcatcgagcatcaaatgaaactgcaatttattcatatcaggattatcaataccatatttttgaaaaagccgtttctgtaatgaaggagaaaactcaccgaggcagttccataggatggcaagatcctggtatcggtctgcgattccgactcgtccaacatcaatacaacctattaatttcccctcgtcaagtaaggtgagcctaccgtgtcccatgtcggagagtagcgattccgattcctcctcga

SEQ ID NO: 1390 - RNA, 381 nt, synthetic construct
  source 1..381: mol_type = other RNA; note = MG159-2_ncRNA_200kan-v2
ggcggaggaatcggaatcgttggcctgtacctcggtaaacgggcggcgatgcgccttccaggcacgatattcgatcaatcaccacaaggtaggctatgcgtggtttggctgttgattagaaaaactcatcgagcatcaaatgaaactgcaatttattcatatcaggattatcaataccatatttttgaaaaagccgtttctgtaatgaaggagaaaactcaccgaggcagttccataggatggcaagatcctggtatcggtctgcgattccgactcgtccaacatcaatacaacctattaatttcccctcgtcaagtaacgccaaaccggtgagcctaccgtgtcccatgtcggagagtagcgattccgattcctcctcga

SEQ ID NO: 1391 - RNA, 381 nt, synthetic construct
  source 1..381: mol_type = other RNA; note = MG159-3_ncRNA_200kan-v1
gggggatgcggcggcgggccggaccttgcgacccgggcggcgtttcgccgtccccgcgatctggcttcccacgcgtcaccggctcgatcttcactgggccgaatttttgattagaaaaactcatcgagcatcaaatgaaactgcaatttattcatatcaggattatcaataccatatttttgaaaaagccgtttctgtaatgaaggagaaaactcaccgaggcagttccataggatggcaagatcctggtatcggtctgcgattccgactcgtccaacatcaatacaacctattaatttcccctcgtcaagtaaaattcggcgtcgagtggaccgatccggtccttggatttgacgaaggcgcccgtccttcgcatcccct

SEQ ID NO: 1392 - RNA, 329 nt, synthetic construct
  source 1..329: mol_type = other RNA; note = MG173-1_ncRNA_200kan-v1
ggctccaagtctgctagcaaagagtgtattcgctctgaagaagacggcactaactgggtggattgattagaaaaactcatcgagcatcaaatgaaactgcaatttattcatatcaggattatcaataccatatttttgaaaaagccgtttctgtaatgaaggagaaaactcaccgaggcagttccataggatggcaagatcctggtatcggtctgcgattccgactcgtccaacatcaatacaacctattaatttcccctcgtcaagtaacccaccctagagtttcaatgaacaataaagatttttcggtttcgtagtagacttggagc

SEQ ID NO: 1393 - RNA, 413 nt, synthetic construct
  source 1..413: mol_type = other RNA; note = MG173-2_ncRNA_200kan-v1
ggaggctatatttgttagaaaaagaaaatcaagttgattttcaaagtgaaaatgtttcatacgtttattatcaggaaaaggataatgctcttttcctgatagtaacgttatgctcgcaggagcagctgctctcataacgttactataattacaactgttgattagaaaaactcatcgagcatcaaatgaaactgcaatttattcatatcaggattatcaataccatatttttgaaaaagccgtttctgtaatgaaggagaaaactcaccgaggcagttccataggatggcaagatcctggtatcggtctgcgattccgactcgtccaacatcaatacaacctattaatttcccctcgtcaagtaacagttgtaatgagaattttcaattagattgggtagcaaatatagcctc

SEQ ID NO: 1394 - DNA, 1206 bp, synthetic construct
  source 1..1206: mol_type = other DNA; note = MG173-3_cloned_into_untethered_plasmid
gctagcgccaccatgtacccctatgatgtacctgattatgcttctggcggcagcagcggcggctcaagcggaagtgaaacacctggaacttccgaaagcgctacgcctgaatcttctggtggatcttctggcggatcttccgcatgcatgggcaagtataaatatattgacaggcttcggcaggccatggagggaaaatactccgaggaatacatcaattattgcgccgaatatgccgcaaaactgctggataagaatctccccgtcatctacgatgccagacacgtcgatgagatacttagacttcatggaattaagcctgattgctaccacatttttgtaattgctggcaagaataaagaacggaagatcacggctcccagtcgagaaatcaagcagcgccagcagtggatactcgaagagattttgggaaaacaggacgtgagcgataactgccacggatttgtgaagaagagatctatactcactaatgccaagatgcacatggggcataaaaatatcctgaatttggacattcggaactttttcccatcaataaccgaaaccatggtaattttccagttccaacagatggggtacagcaaatccgctgctgaagctctggccggtgtgtgttgttatgaaggtaagctgcctcagggcgcaccgacctccccatatatgtctaacctgatccttaagaacatggaccaggatctggagaatttttgccaaaagaaaggaattacatacacacgatatgcagacgacatgtcttttagttcaaacgaggagatcgaggggttctttaaggatataaagtttattatcggcaaatacagcttcgaaatcaacgaaaaaaagacatgctactatcaggacccttaccggaagatcgtgactggcctcgtggtgaaagagaacaaggtttgtatcccaaaaaaattcaagaggaaattcaggcaagagatttattactgtcgccatttgggggttcaaaggcatctggagaacactgggaatcaggaaagagctggtttccgcgagtacatgtatggcaaggcctattttattgcaatggtcgaacccgaggcaggaaaaaaatacctcgaagccctcgacgagatcgagtggggttaccctaggcctaagaagaaaagaaaggtgggtggttctcctaagaaaaagagaaaggtctgagaattc

SEQ ID NO: 1395 - DNA, 1182 bp, synthetic construct
  source 1..1182: mol_type = other DNA; note = MG173-4_cloned_into_untethered_plasmid
gctagcgccaccatgtacccctatgatgtacctgattatgcttctggcggcagcagcggcggctcaagcggaagtgaaacacctggaacttccgaaagcgctacgcctgaatcttctggtggatcttctggcggatcttccgcatgcatgaaggaacgggcttttgccgaagaagaaatttctgcatgttgcaactatgcctctgtactgttgagcaagaacctccccgtactgttcgatgcccaacatattaatatcgtcctccaactgcataaaattaactccgctgcctatcacaccttcacaattccccaggccgagaagttccgcactataacagcaccttccaagccacttaaacagagacagaaatggattctccaggaaatcctgtcaaaggtggacgtctccgagtacgctcacggctttgagcccgggcggtcaatcaagaccaacgccttgcttcacgccaatcatgcatatgctgtttgcatggatattaaggactttttcccttctgtgcattatgactctatatgcaacgtgttcctgagtattggatatagtagctccgctgctcatcttctcgccgacatttgttcatataatggagctctgcctcagggagcaccaacttccccgaagttggcaaatatcatcttttctcctctggacgaaaaactggctgcaattgccaaagaggaacgggccgtctacagcaggtacgctgacgatctgacctttagcggcgaccacgatttgaaaataatctatgcaagagtgaagaacctcctcgaaagatacgagtttaggttgaacgaggagaagacccactcatacggacccggggtcccaaaacgaatcacaggccttgttgtgcagaatggtacggtaagagtgcctaagtattttaagcgcagcctgcgacaggagatacactattgccttaaatacggggtgcttacacatctggagaatgtgaaaagtactcactgtatcaattaccgcgaatacctgtacggcaaagcctacttcatccacatggttgaaccccaggagggtaataggtaccttgagaaacttgatcaaatcgattggccaagtagcttcttggttcctaggcctaagaagaaaagaaaggtgggtggttctcctaagaaaaagagaaaggtctgagaattc

SEQ ID NO: 1396 - DNA, 1218 bp, synthetic construct
  source 1..1218: mol_type = other DNA; note = MG173-5_cloned_into_untethered_plasmid
gctagcgccaccatgtacccctatgatgtacctgattatgcttctggcggcagcagcggcggctcaagcggaagtgaaacacctggaacttccgaaagcgctacgcctgaatcttctggtggatcttctggcggatcttccgcatgcatggaacatattgagaaggcctaccaggctggagtgatcacggaggaagagaaaaggcttatcgaggagtataatcagcggcttactgacaacaatgttcctgttatttataacctccgacacctcaggcagttgctcggcattcataaatctgcccaggatcgcctgttcggcgacaagaagtgtgactcctatagagtatttcatatcccaaaaaagaatggtggcctgcgcgagattgaggctcctaacgaagaactgaaacggatcagactctggataaaggaaaatattcttgataaattcagcgtctcccaatttgccaaggggtttgtaaagggagtgtcaatctacgataatgctgttcagcatactggcaaagagctggtggtgaacattgacctgaaagatttcttcccaagcatccagtaccgggagatctataagatctttaaatatataggatacactgatagtgtcagcaagctcctgaccaacttgtgcacaaacgcccggtcagtccttccacaaggctcccctgcaagtcccacaattagcaacctggtctctcttaaacttgacaaacgacttggcaggttggcagacaagattggagctagttacaccagatacgccgatgacataacattctcaggtaaaaaaaccattcagaagtatattgagctgatcagaaagattatttacgaggaaggatacgaaatcaatgaggggaaattccgcctccagtacgctcaccagagacaagaagttaccgggcttatcgtgaataaggaagtggccatcccccagaaaaggataaacgaactggaaaatgcaatatattattgcaagaagtacggcgtagtggatcacatgtctcacattgggtgtgagaaaggtttttacaaggaacacctgtatggattggcatattacataaagatggtgaacccggaaaaggggttgaaatatctgcttcaactgaatgagatcgagtggcccatccctaggcctaagaagaaaagaaaggtgggtggttctcctaagaaaaagagaaaggtctgagaattc

SEQ ID NO: 1397 - DNA, 1224 bp, synthetic construct
  source 1..1224: mol_type = other DNA; note = MG173-6_cloned_into_untethered_plasmid
gctagcgccaccatgtacccctatgatgtacctgattatgcttctggcggcagcagcggcggctcaagcggaagtgaaacacctggaacttccgaaagcgctacgcctgaatcttctggtggatcttctggcggatcttccgcatgcatggaaaactacagccatctgctcgctaccaagatgcgcgagtcatcatacagcgaagaatacataaagttgtgcgtgcattacgtaaataggttggaggcaaataaagccaccattattttcgaccccgaccatctctccttgttgtcagggtactccaaaaagagaatcaactctttgatccggaatcggcaggataactatcggaaggtgggtatcaagaaaaagtctggaggccaccgagtcctggagctgccagaggaggatttgaaaaacctgcagcagtggatactcgctaatatcctggaaaatataccggtaagtaggtatagtaaagccttcaagaaaggcctgtccattatagataatgccaaaccccatcttagaaaggagtgtgtcattaacattgacattagcaactttttctggagcatctctgccaaatctatccacaaactgttccgaaaacttgggtataccaaggagatgagctcacttttcacaaagatttgtacatttaataatcacctgcctcagggcgcccctacttcaccatacctggcaaacctcgtctgcaagtccctggacagtgaaataattagaatcttgaaaggaaaaaaaatcagttatactagatacgctgacgatctgactttttccgggaacaaggatatggttaattatctggaccagctccaggcaatcgtgaggagccagggctttcaagtgaacgatagtaagacgcggattcaatattccaatcagagacagctcgttacaggaataattgtgaacaggaaactgagcgtgcccaaggagcttaccaagaaacttcgccaagaaatccactattgcaagcaattcggggtgaatggacacatgcagcgacgcgaaattaacaagtctgcatataaggaatatctctttggtatcgcttactttattaaaatggtttctcctaaacttggccgcaggttcatcaagcagttgcgggagatctactgggagtaccctaggcctaagaagaaaagaaaggtgggtggttctcctaagaaaaagagaaaggtctgagaattc

SEQ ID NO: 1398 - DNA, 1221 bp, synthetic construct
  source 1..1221: mol_type = other DNA; note = MG173-7_cloned_into_untethered_plasmid
gctagcgccaccatgtacccctatgatgtacctgattatgcttctggcggcagcagcggcggctcaagcggaagtgaaacacctggaacttccgaaagcgctacgcctgaatcttctggtggatcttctggcggatcttccgcatgcatggaatatatcaccagccttcaaaaagcccttgaacaatcaaattatgacaacgaaggtaagggcaaaattttgcagtatgccgaaaagctcctccggaacaacctcccagtcatcttcgacaaaaatcatcttgctaaactgatgggtattgagctgtctactctgacctactatgccgtgaacacagattctttttataaaaaatataagatcccaaagaaggctggaggattccgcaagatacactcccctagttacaatctcaaactcattcagaaatggatacttaataagatcttgtataagtatgagatccatagcgccgcaacgggctttgtgcctaattcctcaatcctgaataacgcactgccccacgttaaccaaaggctggtttacaatctcgatataaaagatttctttcccgccattaagatctctcgagtcttttacctgttttacaataagggctacactaaggagctgtcctattttttcgcaaaactcttgacatacaaagagagtttgccgcaggggtcacctgctagtccctgtatcgctaatatcatatgcaccaacatggacttctcactctccaaactgagcgaaagagtgaaggcaaactatacccggtacgctgacgacctgactttctctggagactttaacgtaaacatcgtcagtaagataatctacaagattattaataacaacgggttcgaaatccaggaaaagaaggagagggtacagtttcattacaatatgcaggaagtcacaggactgattgtgaatgatggcgtgaaggtgaaaagaaaattgaagaaggagttggataaacacatttacttcagcaataaatacggggtttttaaccaccttcagaagatcgagatggaggataagagcttcttcaaagagtatctgtttggcctggccgcctacgtgaaaatgattgaagaagagaaggggaaagagtatttcaaaaagttgaatgacattaactggctccctaggcctaagaagaaaagaaaggtgggtggttctcctaagaaaaagagaaaggtctgagaattc

SEQ ID NO: 1399 - DNA, 1167 bp, synthetic construct
  source 1..1167: mol_type = other DNA; note = MG173-8_cloned_into_untethered_plasmid
gctagcgccaccatgtacccctatgatgtacctgattatgcttctggcggcagcagcggcggctcaagcggaagtgaaacacctggaacttccgaaagcgctacgcctgaatcttctggtggatcttctggcggatcttccgcatgcatggtgttcttcgggggcaatatgatcccgaaactgatttctgtgcagcagctgaagaaactgtttaagatcgaattgacctgcgacattgagggctttgttgaaaataacaatcaggtttatcctcgcattaaaaaaaacggcgaaattagattcatctccagtccaacgatccatctcaaaagcatacagaaatggatcgtggagcacatcttgtccaagaaggactgttctgagttttgtcacgcctacgtcaaagaaaagtcaatctttacaaatgcagggacccatattggtaaccaaaaccttcttaaaatggacattcacaactttttcgattcaatccctcacatatctgtcaaaaacattttcataactatggggtataatctggaggttagccattcactggcactcctttgcacatacaaaggatacgttagacaaggctttgtgtccagccctatgatcagcaatattatcatgaaggaatttgatgattggatcattaaaagtctgcacgaagaagaatacctgaaattcgatttcaagtatagtaggtacgccgatgacattgctataagctccaagaagaaggctgtggtcccactggtaactatcaaggagaacatctctgattaccttgagaagcatggttttattgtcaacaatgacaagatcaagttgataaagggtaaaggccccaagctcatcactggaattgtggtaaaaaacaattcaatcagtgtgcccaacaaatataaacgaaagctcttgaaggagctttattattgcgaaaaatatggagtggagtcccaccttctctacaccggacagtatgggaagaccaattacaaagagtatctgttgggaattgctatgtacatcaagaatacagactaccagttctataatacaattagggagcggatagatgccctgaacatagactaccctaggcctaagaagaaaagaaaggtgggtggttctcctaagaaaaagagaaaggtctgagaattc

SEQ ID NO: 1400 - DNA, 1224 bp, synthetic construct
  source 1..1224: mol_type = other DNA; note = MG173-9_cloned_into_untethered_plasmid
gctagcgccaccatgtacccctatgatgtacctgattatgcttctggcggcagcagcggcggctcaagcggaagtgaaacacctggaacttccgaaagcgctacgcctgaatcttctggtggatcttctggcggatcttccgcatgcatgtcccaatttaaggagcaggttacactggacgtcccggtgttcaatagtatcgaagaactgcgcgagtccatcggcgtcaaaaaaatatacttttacaaggtgctgtattgtaatgatcggttgtataaacagatcagtatacccaagcggtctgggggcattcgaatacttaatgttccacctattgcccttaaggagatccagagatggatactggacaacattctctataaggtacaacccgaaccttgtgcaaccggatttatgcctaataaaagcattatctcaaatgccgctcctcatcttaagaaaaagtacgtactgaaaatggatataaaggacttcttcccctctattaccttctacgaaatcaggaacatcttctttgaatttggttacgaaaagagtatcgctaccgccttggcaaacatttgcacataccagaataatctgccccagggggccccaacaagcccatacctggccaatctggtctgccgcaatatggacaagcggatatttaaactgtgccagaagcatcaaatcagctacaccaggtatgcagatgacatcactgtgtccgggtcctcaaagatcttttggttgaaaaacgttatcgaggaaatcattgtgcagtatcagttttcactgaacaatgagaagacggtgttcctcaaacccggagacagaaaaaggattactggcattattgtgaatgagaaattgagcgtgccaagaagtgtgacacgaaaccttagaaaagagatctacttccttaagaagttcggcctcgatgaacacctccagaaaatagattttgagggtactcctgagcaatatatttctcatctctatggggtggcttcatatgtcaagatggttgagttgaacaaaggaattttcttcattaaccagctcaactctgtattccacaaggacaaccagcacgaaaacgatgagttgctgtccatcagcccacctccgattgattggtctatctttgacaatcctaggcctaagaagaaaagaaaggtgggtggttctcctaagaaaaagagaaaggtctgagaattc

SEQ ID NO: 1401 - DNA, 1248 bp, synthetic construct
  source 1..1248: mol_type = other DNA; note = MG173-10_cloned_into_untethered_plasmid
gctagcgccaccatgtacccctatgatgtacctgattatgcttctggcggcagcagcggcggctcaagcggaagtgaaacacctggaacttccgaaagcgctacgcctgaatcttctggtggatcttctggcggatcttccgcatgcatggaaaatattgtgtttcaaaatataaataggtcatcccttgccgagaatgaaaaaaatcagctgaaaattatcgcacggtctttgctgattaacggggttcctgtgattctggatattcaccaggcaagactgctcttcggcatcgacggagaaatcgggatcttcgtccacaagcattgtgtccagtactccgtgctcaagaaaaacaaagaagagagaataatctaccagccttcctataagctcaagaaaattcagcgctggattgtgaataatattcttagcaagatcaagatctctgagagctgccacgcctttgttccaggtcgaagtattttgtctaacgccaaggtgcacgtgcatgaagagcctttttggatttacaaaacggatataatcaacttcttcggcgaaataaacttccttgctgttaaggacatattcctcagtgtaggatatagccaagacgtgtctgaaatcctgacctccctgtgcatgtatgatggggtccttgcacagggctttcccacttcaccggtcatctccaatatagttctgtcaaattttgacgaggacttggacgccatcagtcagaagtacaactttgtatacagcaggtatgctgatgatataacagtgagtggtacccagcttaagaacaaggacattgagaaaatcaaaaatatcatcacatacaaactccacagcttgggcttcgaaattaaccggaataaaactaagttttttgggtataaagctgacaaaaaggtgaccggagtagtgatcaagaacggacaacttttctgtccacagaagtacaagaaactgcttaacaaagagctctattacatcaacaagtatggtgtcgatagtcatctgatccataatgagaagacactgatttcaaactacattgggtacctgtacggctatgccggctatatcaaaatgatagagcccgatgtgggagacgaatatgttaagaaacttaactctattttctgggattcaaattttgagcaagatcccagccctaggcctaagaagaaaagaaaggtgggtggttctcctaagaaaaagagaaaggtctgagaattc

SEQ ID NO: 1402 - DNA, 1242 bp, synthetic construct
  source 1..1242: mol_type = other DNA; note = MG192-1_cloned_into_untethered_plasmid
gctagcgccaccatgtacccctatgatgtacctgattatgcttctggcggcagcagcggcggctcaagcggaagtgaaacacctggaacttccgaaagcgctacgcctgaatcttctggtggatcttctggcggatcttccgcatgcatgatcactgagaatcatattcaggcccttaaggccagtacagatgccgacagttttgtgcaagcaatgatgccaggagtggactatttgattgatagcaaaaggtcaaaattggaacatagtgaaatagttaaagtggttaagaattttgagctgttcacctcctccgcatcaattaggcgctacaggacgttcgaaatccccaagaagagcggtgggtcccggaagatcgaagcccccgtcctgcccttgaaaaccttgcagagacttattcttctgtttctggagtctgtgtatgacgctcctgctcaagtccacgggttcgttaaagatcgctcaatcataacaaacgccatgtctcactctaataaagcacacgtgcttaacattgatatagaacagttctttaacagtgtcagacagacaagagtgcgcgctctgtttaacaagcacctggggttttcccagtacagcagcctcatgctttctaaactgatgtgccatagaggttgtttgccgatgggcgcacctacatctcctcttgtcacaaacttgatcttccaacgagctgacaagagaatcttcgctgccagcaaaaagatgaacgtgacttataccagatacgccgatgatctcagttttagctgcgacagcgtagagtcactccatcggaccaaacgcctgattgcagtgatcattcggcaggagggattcaaagtgaatccaaagaaaacccgcctgctccatagagcagattgtcaatcagtaaccggcctcgtagtgaatgacaaggttaacgttctgcggacttaccgacgaactacaagggctataaatcacaggttggagatctctattaaggagcactcaggagacacgaatatggccctcatcgctgctagtgaatatcacgcaatgaagactggacagaatgacgcccggccacccatctctcatctgaactttattaaaggcaggcaggccttcgaatacggcgtcctgaagtccagccagtcccctgaggagtcccctaggcctaagaagaaaagaaaggtgggtggttctcctaagaaaaagagaaaggtctgagaattc

SEQ ID NO: 1403 - DNA, 762 bp, synthetic construct
  source 1..762: mol_type = other DNA; note = MG160-90_cloned_into_tethered_plasmid
atggccttccatgagctgtgggaccagaaattcgagctctcacccggtaaatgggtttttgttcctagtgtcgagagccgagaacgcgggaaatatatcgtgtctgagattaaaaaaaagtgggaagctccctcatacttttatcactgtcataggggaggccatgtcgaagccgtaaaaaagcacctgacccacacgtatctttgttgcatcgatatagaaaacttctttacttccatcaacagaagcagggtgacacgcaccctcaagaaatactttggttacaagattgcacgagaatttgcaaaggatagtgtgatacggttgagcatcgatagtagctccaagtgtatactgcccttcggctttctccaatccccgatcattgctagtatctgcctgcacgaatctgcccttggagatgctcttaataagctggctctgaccccaaatcttatcgtttctgtgtacgtggacgacataatcatctcttgcaacgacctccacttgctgcaaaaacagttcgagtatgtgattacaattgcaaagaagtcaggctggaagatttcagacagaaaaactattcctcctggaaatcagatctctgtattcaacatagagatgtcctgcggggacctgagcatctccagcgagaggatgagtcttttctacaaggcctaccatgatgccatctcagaacaccagaaagaggggattctccggtatattagatccattaatccagagcaggtcgattttttg

SEQ ID NO: 1404 - DNA, 732 bp, synthetic construct
  source 1..732: mol_type = other DNA; note = MG160-114_cloned_into_tethered_plasmid
atgattaagaactataaattcaagtatgagtcaaggggcaagtttctttacgtacctaccgagagatgcgatcagaaggctgaacgcctcgctagttttttcgaaagaaaggccgtctttccttcatatttttaccattatcggagcggaggacatattgccgccattcatgagcacatcaaaaatgactttttcttccggatcgatgtgaagaattttttttactctatcagaaggaatagagttgctagggtcctgaacgcatatgggttcggcccggcaagagccttcgctaaatggagctgtgttttgaatccataccccgaaggcgggtttgtactgcccataggtttccgacagtctcctcttcttgcatcactggtgttggctcgatctcctgtcgtgcaagccatcagcagggcaatgacacggggagtgtttgtcagtgtgtattttgatgacttcatcggttccgctttggacgccgatgcactccggacggcctacgatgatatactcgcagcatgtgaccaggcccaactttacccaaatgaagctaaactgcacgaaacagcaactgccattcaggccttcaactgcgacgtgaaaaagggctccgcccgggtgagccagctgcgcagggaaaaattcgaggggtcttccccaacccccagtgctcgagtgtccttcgactactattgcaagctggttgagcgcgagaaccgcgctcac

SEQ ID NO: 1405 - DNA, 756 bp, synthetic construct
  source 1..756: mol_type = other DNA; note = MG160-121_cloned_into_tethered_plasmid
atggataaatggcagcacaaattcgaaatcaaaaaaggtcaatgggtctatgtgcctaccaaatccatgcttcagttcggaaaaaaacttcaccagaagattagagcaaagtggaccccacctctctacttttatcatatgagggacggcggacatgtagcctcagccagaaagcacataaatagccaatacttcgctctcatcgacataaagagctttttcgagagtacctctcagagtcgcgtcactagggagctgaaaaacatcttcaagtacaaagatgcccgggaaattgctaaactcagtactgtcaagaacccaatggtacatggtactaagtatgtgattccctacggctacccgcagagccccatcttggctactctttgcctgcataaatcttattgtggaaacctgctgcggtccattaataagagcgggaatgttctgatcagcgtgtatatggacgacattattatctcagggaatgatcttaacctccttaccacaacatattctctgctgagagatgcattggaaaagtccggctacctgatgaatgaggttaagtcccaatcccctacaaagacgctgaaggtctttaatctcgagttgagtcaccagtctcttcgcgttagcccaaagcgaatcgtggagtttctgatagcctatgctaagtctacatcattttacgaaagggaaggcatcgccgcatacgtggggtcagtgaacaataaacaggcaaacttgttcccc

SEQ ID NO: 1406 - DNA, 753 bp, synthetic construct
  source 1..753: mol_type = other DNA; note = MG160-12_cloned_into_tethered_plasmid
atgcctgcaaaatactcatctaagtttcagctcaagcccgaggtgtgggtcttcgtgcctacccttccttccctgaagctcggagaggaaatcaaaacactgctggagaagcgctggaaagcaccctcctactacttccacctccgaaagggcggacatgtggcagccctgagatctcatttttcccacaagtattttttgcacttggacatacagaattttttcggttccatcaataaatctcgcgtaacacggaacttgaagaaatttttcccgtatctcaccgccagagatttcgccaatcatagcactgtggtccacccagagaccaagaagacggtcctgcccttcggctttgtgcagagccccatcatcgcatcattgtgcctggagcaaagcgcactgggtagtcatctggacaaacttcacaaaacagccgagatcagcgtatcagtttatgtggacgatattgttatctcagctgataatgaggccgctattaccgctattaaagagcaaactatttacgccgctgaacagagtcttttctccctcaacgaaaaaaagagcgaagggccaagtctccagattactgccttcaacatccaacttagcaatgctatgatgaacattacaccagaaaagatgcgggaatttaagaaaacttacggggacagttcatctgaagaccagaggagggggatattgggctatatttccagtgtgaactatgatcagctgtctgaggttata

SEQ ID NO: 1407 - DNA, 795 bp, synthetic construct
  source 1..795: mol_type = other DNA; note = MG160-136_cloned_into_tethered_plasmid
atgaccctcccctggaaggataggtttcaggtaaagcccggacgctgggtgtacatccccacacctgagactcttgagcagggcaggcagatcaaagcactggtgacagagaatttccaagccccaccgttctattatcatcttcatgaagggggacacgtcgccgctatacagagccatacggacgacaggtacttcttgaacgttgacatagaaaacttctttggcgctataaaccgcagtcgagtaaccagaagcctgaaaaaacggttcccttatccactcgccagagaaatcacagttcaaagcaccgtgagggtcacaaacgagggacggtacgaataccacttgccatatgggtacccacagtccacaatcctcgcatcaatttgcctgttcgattctgcccttgggaagtacctgctgtctttgtcagcccaacacaatgtctctatctatgtggacgatattattatcagtggtaacgaccacgcagaactcaatcgaatttccgacactttggtcgaaaaatccgttgcatcaagactgccttttggcagaaagaaagtgactcaggtggccgatcggatcaccgcttttaatattgtgctgtctcatcagtacatgcagatcacagatcagagatataatcagctgctgcaacaggctttgctgactgataatgagaacgtgattgagggtattctctcctatgtacttagcgttaatccccggcaacacaacaacatgcgccaggagttgtttacgttgagtaataccaccaagactcctgtg

SEQ ID NO: 1408 - DNA, 759 bp, synthetic construct
  source 1..759: mol_type = other DNA; note = MG160-177_cloned_into_tethered_plasmid
atgcacccaaagtggtcctctaaattcgagctcaaacctggtaagtggattttcgtgcccacagctgaaaccgtcatcgagggacggaaaatcaaactcgccattaagaagaagtggaaaccacccagctattattttcatttgaaggcaggaggacacgtggaagctcttaggacacatatggaacacgataactttctgcgaatcgacataagagatttctttggttcaataaatcgaacgagagtcacacgctgcctgaaggacaaatttgggtacgggatcgccaggtcatacgctaatgcttcaactgtgcctgaccccgttgtgccgaagagattcatcatccctttcgggtttgtacaatctcagatcattgcagccgtctgtcttgaggaaagtgcactcggcatctacctgaacaatctgagctccaaccccgcaatagctctgaccgtgtacgttgacgacattattgtcagcactagcgataaggtgctgttggatcaggtactgacagacatagaggtggcagccaaacgcgccaatttcactttgaacgctgataaacaggagggcccagctgcagccattactgcctttaacattgttctcgcaaaggactctatggtagtggatgcttccaggatgaagaaatttgaagaagccttcgccaccgccacatctgagtcacagcgggctggcatcaaaagttatgttaccagtgtgaatgcctcccaagcccttgcaaccttccct

SEQ ID NO: 1409 - DNA, 696 bp, synthetic construct
  source 1..696: mol_type = other DNA; note = MG160-50_cloned_into_tethered_plasmid
atgtatgtccagactgaaaagtataaggatttcgggagaaaacttatcactaaagttcgagctaaatggactcctcccccatacttttttcatttggcaaagggtggccatgtagaggcagctaggcttcatattgatagcaagtacttcgcccacctcgacttgaaaaagtttttcaacagctgccgccggagccgggttgtgcgcgccctcaagagtatcggattcaagcagcgacaagcactggagtgttcttcagactctctggttcggctcggcggagagagagtcattccatacggttttacccagagtcctatcctcgcatccatttgcctgcatcactctgcactgggcaatgaaatggcttgtcttcacgatgaaggcaagaaagtgtccctgtatgtggatgacatagtggtttccggagacacagaggccgaagtagaggggctggtggacaggctgatcaaatccgccgagaatgccagattcgctctggcacacgataaggtgagcgggacccagccagaaattacccccttcaatctcgtgcttgccaacaacaaattggagctgagtgccgaacagtatgctgagtttaaaacaagagtcgctgctgacccggcttcagccgtggcccagggaacgataaggtacgctgggtttgtcaatccttcacaagcagccacattg

SEQ ID NO: 1410 - DNA, 732 bp, synthetic construct
  source 1..732: mol_type = other DNA; note = MG160-193_cloned_into_tethered_plasmid
atgcctgtgaagtttgagaactacacacactccttccggctgaatggtaaacctgttttcgcacctagcgatctgggccggcgcatcggggaggacttgaagcagcgagtagagaatgcatttgtgtttccagattacttcttccacctcaggaaaggcggccatgtggccgctcttcactctcacagagagaacacccatttctgcaaagttgacatcgaaaattttttttattcagtggctcggaatcgagtggttcgggccctccgcgccaccggtgtcccaagagcagcccattatgggaagtggagctgcgtccagaatccatacggtcatccctcctatgcactgccatatggattcgtacagtcccccatcctggcaactctggttctcgctacgtcagaagtgggccgcgccttgagaaggatgagtaaagacaccaccatagccgtgtatgtagatgatattagcctctcttccaatgaccatacacagttggctgccaggtacgatgaactgcttgaggcaattgggcttgccgggttcactgccaacaagggcaaatgcgtggctccttgttctgacctgactgtcttcaactgttctttgcaaaagggagaaacagctgtcacaccggacagagtggcagaatttcacaccactctgcccagtcccgcctcacttgctggatttgaacactactgtcaaagtgtcgagaggggaaacagc

SEQ ID NO: 1411 - DNA, 780 bp, synthetic construct
  source 1..780: mol_type = other DNA; note = MG160-195_cloned_into_tethered_plasmid
atggaccttggccttagaaattacgagtactcttatcggaatgcaaaaggtaaacccgtgtttgctcctagtgtcaaagggcgagagattggccagaaggtgaagaaattggtgacggaggctgttgacttcgatggcatatattaccatcttcgaagcggtggacacgtctcagcactccacgtacatcgggagaatgaatggttttcccgcattgatctcaagaactatttctattcaatcagccggaacagaatcaaccgcgagttgagaagaattggcattaggcatcacgaaagattcgctaaatggtccaccgtgaagaacccctataaacttcccagttattctctgccttacgggttcgtccagagtccaatcctggccacactggcttttcaaaactccgcagtaggaaccctgctgcgggatatggccagcgaaattgccgtgagtgtgtacctggacgacatcgggctgtcatcatccaatttggcactcctccaaaaggtgcaccgagccacattggaagctgtcgaagagagcaacttcgtcgttaatctggataagactgccgagccagcatctgagatggtgctctttaactgtgatctggcccatgcatccgcaaatgttcgcgccgaaaggatagatgaatttttttctatcgagaggagcgagccgtctgccagcgctttcctggcttactgcgaagccgtttcagccggcaatctcactcctggtgtagacgctgctggagtggacaggggacacagtggg

SEQ ID NO: 1412 - DNA, 756 bp, synthetic construct
  source 1..756: mol_type = other DNA; note = MG160-210_cloned_into_tethered_plasmid
atgcagactaagtggcagcataagtatcaaaggagccctgggaaatgggtattcgttcctaccgaagaatcccgggccgagggcaaagcaattaaggaagctgtcgaggataaatggcagccgcccacttactactatcacttgcgagcaggagggcacgtagccagccttcggagtcacgtgaacaatacttatttcctgaggctcgacatccaggacttttttgggagtgtcacacggtcacgcgtcacaaggtcacttaaaaaaatcttcggatatgagagagctagacaaatggcaaacgactccacggttaaacatcccgctgacaagaatagagctatgctgccatacgggttcgtgcagagtcctaccctggcatccctcgccctttttgactcccgactcggaggttatctggagcaacttaagaaaataaagtacgtggttgttagcgtgtacatggatgatataattgtgtctacaaaacgcaagaagagattggcagatattcataaggagcttgtggccgctagtgtgaagtcacgcttcaactttcagcccgataagaccgagggccctgccatcaaaatttctgcctttaatatcgaactgggctctggcgatattcaggtgaccccagagaggctgcaggaattttacgacgcattcaaaaagacttcaagcctgttggaaaaaaacggtatcgctggatatgtgtctagcgtcaatccagcccaggccacactgctcgta

SEQ ID NO: 1413 - DNA, 771 bp, synthetic construct
  source 1..771: mol_type = other DNA; note = MG160-223_cloned_into_tethered_plasmid
atgtcaacaagcaaaaggtggattcataaattccagataaagaacaatgtgtgggtgttcgtccccgacaacgaatcccgcagatatggaaatgaaatcaaatccaacatcgacaagaagtggaagaagccttcttactactaccacttccgcgatgggggccatgtagcagccctgaaatctcatattaacaatactttcttcatccacgccgacatacaggatttttttggagcaatcaataagtcacgggtcacccggaacctgaagagcttcttcggttacaagattgccagggagattgctgaaaagtcaactgtgcagtgtccacactccaacgtgaaaaagtacgttctcccctttggttttgtgcagtcacctattctggctagtttttgcctgcacaagagcaggctcggggtatatcttgataagctctatgacagtggagatttcaaagtttccgtgtatatggatgatataatcattagcggcaaaaagctggaggaccttaatgagatcctggttaaactcaatagtatctccgaccactctggattccagttgaatattaagaagacacaaattagcagcaccattaagagttttaacatcgagctgtcccataataaattgagaatatctaaggaacggatgtgcgagtttattagtcactatatgtctggcgggaaatatagacgaataggcatcctctgttacatctcaacggtcaacaaaaaacaattgcgagtgtttaaacttatcgacaaa

SEQ ID NO: 1414 - DNA, 753 bp, synthetic construct
  source 1..753: mol_type = other DNA; note = MG160-232_cloned_into_tethered_plasmid
atgcaaagcaagtggaaaagccgcttccagctgaaacccgggaagtgggtctttgtgcccacagacgagtcaattcggcttggccatgaaattaaatccgcaatcgaaaatgtgtggctgcctccagaaaattacttccatttgaggtcaggcggtcacgttggtgccattcgctcccacatgccaagtaaatttttcctgagaatcgacatacagaacttttttgcctcaattaataggactagaatcaccagatgccttaacaagtttttttcctatcagaaggcacgagattgggcaaatgcttctactgtgattgctcctaccggagaaaaaaggacaatccttcctttcggcttcgtgcagtcccaactgatcagtgccgtgtgtttttccgagtctgctctggggcgatgcctggctggcattcactgtgataaatccttgcgggtgtctgtatacgtagacgatataatcgtctcttcagataagaaggaagcctgcgggagcgccctcgagaagatacgcgtggccgccgacagaagtcggttcaaactcaatgaggagaagctcgagggaccgagcgagtctatcaccgttttcaatgtcatcctcagcaaccagcggatcgaaattcaggctagtaggatgaaggacttcaagaaaacgtttgcatctacaactaacgagtacgagaaagctggaatcctcagttatgtttcaagcattaacttggatcaagccgcagaactg

SEQ ID NO: 1415 - DNA, 753 bp, synthetic construct
  source 1..753: mol_type = other DNA; note = MG160-24_cloned_into_tethered_plasmid
atgaagaattacttccggaaaatcccccttggggacggcaagttcgcctacgagcaaacaccagaggctcgaaaagaaggagaaaatttggttaaacaggtatttaaaaggtgggatgccccgagcttcttctttcacatgaaggcagggggccatgttgccgccctcgcctcacacaagaagaactgttattttaccaagctggatataagccgcttttactacaacgtcacgagagcaaaactcgtgagaagtcttcagaagatcggcgtgccattcgaggctgctatgtactatgctcaaatttctctggtgtgcgaccgggggcataggtttctgccttatggctttcaccaatcccctgcactgtccgccctggtgcttgataaaagtttggctggtaggtacttgcgggaagccgctcgcaagtttactctctccgtgtatgtagacgatataattctctcttcacgaaacagtgaggccctggcaaaaagcagcgatcagctggtgcaggctctccatggatcaaacttcagtattaatgagtctaaatctaagatctgtagcgcatcatgcatctcattcaacgtgctgatacaggaaaattccacagaaatcaccgaccaacgcctggaccagttcaaaagacagatcagcgaggtcaatggaaaggaaagtgttgtgcagggaattttgcagtatgtccactctatttcccccgagcaggcaaagggtcttgccagagaggtc

SEQ ID NO: 1416 - DNA, 840 bp, synthetic construct
  source 1..840: mol_type = other DNA; note = MG160-265_cloned_into_tethered_plasmid
atggcaatcgagtttgaaaactttctttattcctactccaaaaagggaaagcggatcttcgtgcctaataggttctcttgcaatctgggtaaaaaacttaagagaaagatcgccaaaaaataccgattcgacagcttcgtgtaccatttccgcaagggcagccacatcgccgctttgcaccggcaccgaaaaaataagtttttttgtcgcctggatataaacagatttttttactcaattcgcaggaatcggattaagcgcgcactcaaacagattgggatcgagaagccagagtatttcgccaaatggagcactgttaggaacccctatgaaggtggcggctatgtgctgccctatggattcgtgcaatccccggtcctggccaccttggttctcgctctcagtcccattggagcataccttagagggctgccaaaaacgatcacctgctcagtctatatggacgatctctgcttgagtgggcctaacttggctgaactcaaagcagccttcgatgggctggtggctgccgtggagcaggctggattcacactgaacgataagaaaacaagagaacccgccgaacaaattgatatatttaattgttctctggcaaatgacagcacagccgtccttcaggaccgagtagacgaattttacgcaaacgagagaagtgaggctgccgttgacgcatttgagacctactgtgatatagtgcagtcaaaaacctggcggcatggcccatccaagaagaagaggaataaagtatatactgagcggaggaagaaggctgcccctactacacctctgccggaggaagagccaagagaaattgcttct

SEQ ID NO: 1417 - DNA, 750 bp, synthetic construct
  source 1..750: mol_type = other DNA; note = MG160-34_cloned_into_tethered_plasmid
atgaagcggtgggaacacaggttcgaggtgaagcccggcagatgggtatacgttcccacgccaatcgggaaagctagtggagaagtcataaggctggcagtgtctaaagtatggtccagtccgtctttctactttcatttgcgcggaggaggtcacgttgccgctctcagaagacatacccctcaccagtatttctttaggtgtgactttgacgatttttttgggcgcatcaacgaatcaaggttgactcgctgcctgaaacggcgatttagctacgccgaggctcgccagatggcaagggagtccgtggtcattaaacccggttcaaaaaagactatgcttccttacgggtacgtgcagagcccaattctggccagcctcgctctggacaagagtcgggtgggcagattcctccgacaatgcgacttgtctgagcacctgaccgtctccgtttatgttgatgatataattctcagctcaaatgatgatggactcctgggtgatgctgctgccgagttgcagcagctggcccttgacgcagggcttcctctgtccagcgaaaagacagcaggccccgcatccgccatcacagccttcaatgtggagctgtctcatggatcaatgagcttggagcatgacagacttcagcggttccgagaagcctatgctatggccagttctcctcaagtagaagctggcatccttggctatgtgcacaccattaacccagcacaagtggcagccgtccca

SEQ ID NO: 1418 - DNA, 753 bp, synthetic construct
  source 1..753: mol_type = other DNA; note = MG160-306_cloned_into_tethered_plasmid
atgttggatacttattcccataaatttcgcaccccacgcggactcctggtttatgtgccaacagtgtttggggccggcgaagggaggtcaatcgtgaggaaagtccagggcagatggaccagccctcgccactttttccacttccgcgatggagggcacgtcgccgcatgtaggtaccatgtgcggcaacagttcttcgcccacatggatataaaggcctttttcaattctgtcacaaggagcaaagttcatagagcccttaggagaattggctttaaccagcgagacgcagtaggtatctccgaactgtcaacagtggaggacattaccactcctggccgctatgctctcccgttcggctttattcaaagtatgatcctggctacggctgcattggatcggagccgactcggaaaagagcttcgaagagcccggcgatacagagtccggatctctgtttatgtagacgatatagtgctgtctggaagcaatgtcgcagacctcgccggttacatggctgttttgaacgaagccgcagacgaggctgggtacagtttcaataagtccaaggctagtggacccgcaggcgcaacaaaggcctttaatgtgctgctctcatccaacgacatgagaatctctcccgaccggatggtggagttcgaactggcccttgctactgagactgaggaagtgcggattgccgtattgaactacattaggaccgtgaatagaggtcaggctgatgctctgctg

SEQ ID NO: 1419 - DNA, 780 bp, synthetic construct
  source 1..780: mol_type = other DNA; note = MG160-358_cloned_into_tethered_plasmid
atggagatgtggaagcataaattcgagcttaaaaaagatcggtgggtgtacgtacccactagagaaatcgctaatctcgggaaaaagatccaccaatacctgatgtttaagtggaacactccgctccatttctaccaccttcgcgacgggggtcacgtggccgctgctaaactgcacacgggcaataagttcttcgccctgatcgatattcaggatttctttaactgcacaacccagtccagggtgacacgcgaactcaaaaagtttattccttatgctgaagcacggaagctggcaaaactgtccacagtgatcatcccaaacattcagcctgtcagacgcgcaatcccctatggattcccacaatcacccatacttgccaccctctgtttcaataatagtcatgccggtggcgttatttcctcaatcataaagtcagggcaggtccgaattagtgtctatatggacgacattataatcagcggaaacgacgtagccgtgctcaatcaagaatttgagaaggttctgaccgccttggtgaaaagtaaatatgagattaatgaaaagaagaaaaagttgcccagcctggaaataaaagtgtttaacatgctgttgagccacaacagccttagagtcgcccctgagaggatgattgcatttgttcaggcctatgcaaagtctgagtctgatgatgagcgaggcggaatcgctaggtacgtgtactctgttaatgagcagcaggctcggagacactttcctaagcatatgccagactacgaa

SEQ ID NO: 1420 - DNA, 768 bp, synthetic construct
  source 1..768: mol_type = other DNA; note = MG160-393_cloned_into_tethered_plasmid
atggaaatgtggaaacacaagtttgaagttaagaaagatcgctgggtgcacgtcccgaccaaggaaatgtccatctttggaaaaaagctgaataagattctgcgctctaaatggaaatcacctgattacttctaccaccttaagaacggcggacacgtgagttctgctaggatacacattgagaatgaatacttttctttggtggatatatcaaactttttcgaaagcactagccagtcacgcgtaactcgggagctgaaaacaatcattccatatgagaaggccagactcatcgccaaggccagtaccgtcaggttggcaaaccgaaaggagaaaaagtttagcattccatatgggtatcctcagtcccccatcctggcctctttgtgtctgaacaattcatttgcagggagagccctggacctcatcattaaaagaggcgacgtgctcgtatctgtttatatggacgacataattttcagcagtaataacctgaatagtataacagagagcttcgaccttttttgcattgctctcgaaaagtcaaagtacaagatcaacaaaaataaaacgcagaggcccagtaaacagctggccgtgttcaatctggagttgtcccatcaccatctccgggttgctcctgaacggatggtgcagttcatccaagcctatgctcaatccgagaacgaacatgagtgcgagggtatcgcagcatacgtgagaagcgtcaattccaaccaggctcttcttcatttcccccgaaaagat

SEQ ID NO: 1421 - DNA, 771 bp, synthetic construct
  source 1..771: mol_type = other DNA; note = MG160-403_cloned_into_tethered_plasmid
atgcacccacacgaaaggtggaggagtaaattcaaaatcaaggaatgcacttgggttttcgtaccgactgacgagaccatcgccaccggacttcaggtcaaggaactgattgagggatattggtccgccccagatcactactaccacctgcgcaagggcgggcacgtgcttgctcttcagaaacatacaaagcataagttttttatccacctggatatacaaaatttctttggccaaattaacaagtcacgggttactcgatgcctgaaagagcatatcccatatgaaagcgccagagagatagccgtcgaatctacagtacgactccccgagtctgctgaaacgaaatttatcttgcctttcggatttgtccaatctcctatcattgccagcctgtgtctcagcaaatccgccctgggcagatacttgtaccgcctggagcagagaaaggggctggacgtgagtgtgtacatggatgacatattgatctcaggagacaacattgaggagctcgaacaggaacttgtgaagattaaagctgcagcagagaaatccggtctccccctgaatcctcttaagcaggaggggcctgatacctgtgtgtctgcattcaatatccggctgtcacagggcttgcttaagatcattccctcaaaacttcaggaactcgctaatacctattccagcagcacaaacgagcatcagagggcaggtatcttgaactatgtgctcagtattaatctggcccaggctgaactgttcttgtatatt

SEQ ID NO: 1422 - DNA, 768 bp, synthetic construct
  source 1..768: mol_type = other DNA; note = MG160-416_cloned_into_tethered_plasmid
atgcctaaaagactctgggttgacaagttcgagattaagccgaataaatgggttttcgtgcagtcactcgagcataagaagcgggggttggctctggtggctggactggcaaggaggtggagcccaccctcattctattatcactttcgcgaagggggtcacgtggccgcattgaagagtcataaaagacatcagtactttttttatatcgacatacgagacttcttcggtagtattaataagacacgcattacgcgaattttgaaaaagcacatgaagtatgatgccgcacggtctgtagccaacttttccactgtaaaaatcaaaagcaactccgaagagaaatatgtcctgccattcggctttacccaatctccttttctttccgccatgtgcctcgatgacagtcaacttgggagactcctgcgggagtacagcgtgctgtcatcaagtggatcactgaatgtgtccgtgtacatggatgatataattctgtcttctagcaaccttaagtaccttacagacgccggccagagcatcctcactgctgtgaatagatccggattcgagatcaaggatataggcgatgccgacgtcaaagagcttgttgaagtctttaacgttaggctgtcccagggactgttggaaatcacccaggaaaaaatgcacgacttctctatgcgctacgctgtcagttctaatgagaacgaacaacttggcatctataattacgtgaagagcattaaccccgcccaggctgcactgctt

SEQ ID NO: 1423 - DNA, 792 bp, synthetic construct
  source 1..792: mol_type = other DNA; note = MG160-45_cloned_into_tethered_plasmid
atgaccttgccatggaaagataggttcgaggtgaagcctggacgatgggtgtatattcccactcaggagacattggaaaagggccgccagatcaaagcacttgtggccagtaagttccaggcaccgtccttctactaccacttgcatgagggaggacatgtcgcagctatccagagtcacattgatgacaggtattttctgaatgtggatattaagaacttcttcggagtgataaatagaagcaggatcacccgctccctcaaaaagcgattcccatacgcccaggctcgggaaataacagtgcagtccactgtacgggttgtgggtgaatcacgctatgaatatcatcttccttacggttatcctcaatcaaccatcctcgcatctatttgtctggtggatagtgcccttggcagataccttaattctttgtctaaccaatgcaacgtgagcgtctatgttgatgacataattatttcagggaatgaccccgacgagctgcaacagatcagtgacacgctggccgagaagtcagaggtttccaggctcttttttggccggcagaaagctcaccaggtaagcgagacaatcaccgcctttaacattgaactctcccagcataaaactaagatcacacaccagcggtactctcagctgctgcaacaggctctgctcgctgacaatgaaagcgttatcaacggggtactgggctacgtcagaagcgtcaatagagaacaacacatagagatgcacaaggagctgtttactctcgggcatatcaaagcccccgcc

SEQ ID NO: 1424 - DNA, 735 bp, synthetic construct
  source 1..735: mol_type = other DNA; note = MG160-483_cloned_into_tethered_plasmid
atgacggtacagttcgctaattttgagtacagcttcacactcaaggacaaaccagtttttaaaccctcagagcgagggaaagcaatcgggctggcattgaaggaggaggtcgaaagagcaattactttcgaccctttctattatcatttgcgcgacggaggacacgttgcagcccttcacgctcatcggcctcacaggtggtttgcaaggcttgatatagagaggtttttttacggcattggtcgcaatagagtagctcgggctctggctaaggtgggcatcccaaaagctgggtatcgggccaagtggagctgtgtgaggaatccatataatgatccgcggtacgctctcccctacggatttgtgcagtcccccatacttgccacccttgtcctgatgagtagtgaagtaggtgagttccttcggaacttggccggcgccgtgacagcatctgtgtacatggacgatattgctgtgagctcagacgatcaagtcttgctccaggaggccttcgatgctctgcgcgaagtggctgcccaatccaatttcgtgctcaacgccgaaaagaccagagcccctgccgaggttatcgaactgttcaactgcaacctgttccaccatgtcactgcagttagagaagaacgaagggccctgttttatgaggaacctcgcaatgacgcttctcagctggcatttgagcgatactgcgatagaatcgaagagggcaacgccgga

SEQ ID NO: 1425 - skipped

SEQ ID NO: 1426 - DNA, 2163 bp, synthetic construct
  source 1..2163: mol_type = other DNA; note MG151-123_M304R_cloned_into_tethered_or_untethered_plasmid
gctagcgccaccatgtacccctatgatgtacctgattatgcttctggcggcagcagcggcggctcaagcggaagtgaaacacctggaacttccgaaagcgctacgcctgaatcttctggtggatcttctggcggatcttccgcatgcggcattgctgctgtggatacggacaacattaaacagttgtccgcacttcccgggctgagtgaagatccatccgtggtgggtctgttgcaggtaaaggagcaacaggttcctatcgccacaaagacggtgcacaggcgccagtatcggacgaatagagacagtctgctcccaatacataagcttatacggcaactcgaagatcaaggcgtcatttccaagactcattctccattcaattctcctatctggccagtgagaaaggccagtggggaatggcgcctgacagtggactacagaggacttaatgaggtcactccacccctttccgctgcagtccctgatatgctcgagctgcagtacgagcttgagtctaaagcagctaagtggtacgcaaccatcgatattgccaacgcttttttctcaataccactggccaaagagtgcaggccccagttcgccttcacttggaggggcgtgcagtatacatggaaccggctcccgcagggctggaagcactctccaactatctgtcatggacttattcagacagtgctggagcagggatcagctcccgaacaccttcagtatatcgatgacatagtggtgtggggcgacaccgcagaagaggtgtttacaaaaggtgagcgcataattcaaatcctcctttgcgcaggtttcgcaattaaacgaagcaaagtgaaaggacccgcacaggaaattcagtttctcggtatcaaatggcaggatggccggaggcacatccccacagatgtgatagataagatctctgccatgagcccacctactaacaaaaaagaaacacaatcattcctcggcgtagttggtttctggcggatgcatgtgcccaactatagtctgatcgtctcccctctgtatcatgtcaccaggaggaaaaacgaatttacctggggacccgaacaacaacaggcctttgagcagatcaagcaagagattgccagggctgtcgcccttggccccgtccgaatggggcaaggaatcaaaaatatactttatacagctgctggcgaaaaagggcccacctggagcctgtggcagcgagccagcggcgaaactagagggaggccactcggcttctggtccagggcctaccggggatctgaagaaggatacacccctactgagaaggagatcctggcagcctatgaaggcgtgagagctgcttcagaagttatcgggactgagacccagctgttgctggcaccccgccttcctgttctgaattggatgttcaagggaaaaggaagtagctcccaccatgctacagacgctacttggagcaagtggattgccttgatcacgcagcgcgcccgcatggggaacttgaatagaccaggtattctggaggtcattatggactggcctgaaggcaagaagtttgggaccccgcctgctgaagagatcagccgcgccaaggaggctcctccgtacaatgaactgcctgagaacgagaaaacctatgcactttttacagacggaagctgttgcatagtagggaagcacagacggtggaaggcagccgtttggtcacccacaaggcaggtcgcagaagcaaccgaaggcaaaggagagtcatctcagtttgctgaggtcaaggctgtgcagttggccctggacgtagccgagagggagagatggccaatgttgtacgtgtacaccgatagttggatggtggctaacgctctttggggttggctccagcagtgggagcagaataactggcagagaaaagggaagcctatttgggctgccgacctgtggaaggacattgccgcacgaattaaaaatatggtgatcaaggttagacacgtagacgcccacgtaccgaaaaaccgagccaccgaagaacaacagaataatcatcaggttgatagggcagctcggatcgaggttgcccaaattgacctggatcctaggcctaagaagaaaagaaaggtgggtggttctcctaagaaaaagagaaaggtctgagaattc

SEQ ID NO: 1427 - DNA, 2163 bp, synthetic construct
  source 1..2163: mol_type = other DNA; note MG151-123_H287F_cloned_into_tethered_or_untethered_plasmid
gctagcgccaccatgtacccctatgatgtacctgattatgcttctggcggcagcagcggcggctcaagcggaagtgaaacacctggaacttccgaaagcgctacgcctgaatcttctggtggatcttctggcggatcttccgcatgcggcattgctgctgtggatacggacaacattaaacagttgtccgcacttcccgggctgagtgaagatccatccgtggtgggtctgttgcaggtaaaggagcaacaggttcctatcgccacaaagacggtgcacaggcgccagtatcggacgaatagagacagtctgctcccaatacataagcttatacggcaactcgaagatcaaggcgtcatttccaagactcattctccattcaattctcctatctggccagtgagaaaggccagtggggaatggcgcctgacagtggactacagaggacttaatgaggtcactccacccctttccgctgcagtccctgatatgctcgagctgcagtacgagcttgagtctaaagcagctaagtggtacgcaaccatcgatattgccaacgcttttttctcaataccactggccaaagagtgcaggccccagttcgccttcacttggaggggcgtgcagtatacatggaaccggctcccgcagggctggaagcactctccaactatctgtcatggacttattcagacagtgctggagcagggatcagctcccgaacaccttcagtatatcgatgacatagtggtgtggggcgacaccgcagaagaggtgtttacaaaaggtgagcgcataattcaaatcctcctttgcgcaggtttcgcaattaaacgaagcaaagtgaaaggacccgcacaggaaattcagtttctcggtatcaaatggcaggatggccggaggcacatccccacagatgtgatagataagatctctgccatgagcccacctactaacaaaaaagaaacacaatcattcctcggcgtagttggtttctggcggatgttcgtgcccaactatagtctgatcgtctcccctctgtatcatgtcaccaggatgaaaaacgaatttacctggggacccgaacaacaacaggcctttgagcagatcaagcaagagattgccagggctgtcgcccttggccccgtccgaatggggcaaggaatcaaaaatatactttatacagctgctggcgaaaaagggcccacctggagcctgtggcagcgagccagcggcgaaactagagggaggccactcggcttctggtccagggcctaccggggatctgaagaaggatacacccctactgagaaggagatcctggcagcctatgaaggcgtgagagctgcttcagaagttatcgggactgagacccagctgttgctggcaccccgccttcctgttctgaattggatgttcaagggaaaaggaagtagctcccaccatgctacagacgctacttggagcaagtggattgccttgatcacgcagcgcgcccgcatggggaacttgaatagaccaggtattctggaggtcattatggactggcctgaaggcaagaagtttgggaccccgcctgctgaagagatcagccgcgccaaggaggctcctccgtacaatgaactgcctgagaacgagaaaacctatgcactttttacagacggaagctgttgcatagtagggaagcacagacggtggaaggcagccgtttggtcacccacaaggcaggtcgcagaagcaaccgaaggcaaaggagagtcatctcagtttgctgaggtcaaggctgtgcagttggccctggacgtagccgagagggagagatggccaatgttgtacgtgtacaccgatagttggatggtggctaacgctctttggggttggctccagcagtgggagcagaataactggcagagaaaagggaagcctatttgggctgccgacctgtggaaggacattgccgcacgaattaaaaatatggtgatcaaggttagacacgtagacgcccacgtaccgaaaaaccgagccaccgaagaacaacagaataatcatcaggttgatagggcagctcggatcgaggttgcccaaattgacctggatcctaggcctaagaagaaaagaaaggtgggtggttctcctaagaaaaagagaaaggtctgagaattc

SEQ ID NO: 1428 - DNA, 2163 bp, synthetic construct
  source 1..2163: mol_type = other DNA; note MG151-123_H178R_cloned_into_tethered_or_untethered_plasmid
gctagcgccaccatgtacccctatgatgtacctgattatgcttctggcggcagcagcggcggctcaagcggaagtgaaacacctggaacttccgaaagcgctacgcctgaatcttctggtggatcttctggcggatcttccgcatgcggcattgctgctgtggatacggacaacattaaacagttgtccgcacttcccgggctgagtgaagatccatccgtggtgggtctgttgcaggtaaaggagcaacaggttcctatcgccacaaagacggtgcacaggcgccagtatcggacgaatagagacagtctgctcccaatacataagcttatacggcaactcgaagatcaaggcgtcatttccaagactcattctccattcaattctcctatctggccagtgagaaaggccagtggggaatggcgcctgacagtggactacagaggacttaatgaggtcactccacccctttccgctgcagtccctgatatgctcgagctgcagtacgagcttgagtctaaagcagctaagtggtacgcaaccatcgatattgccaacgcttttttctcaataccactggccaaagagtgcaggccccagttcgccttcacttggaggggcgtgcagtatacatggaaccggctcccgcagggctggaagcactctccaactatctgtaggggacttattcagacagtgctggagcagggatcagctcccgaacaccttcagtatatcgatgacatagtggtgtggggcgacaccgcagaagaggtgtttacaaaaggtgagcgcataattcaaatcctcctttgcgcaggtttcgcaattaaacgaagcaaagtgaaaggacccgcacaggaaattcagtttctcggtatcaaatggcaggatggccggaggcacatccccacagatgtgatagataagatctctgccatgagcccacctactaacaaaaaagaaacacaatcattcctcggcgtagttggtttctggcggatgcatgtgcccaactatagtctgatcgtctcccctctgtatcatgtcaccaggatgaaaaacgaatttacctggggacccgaacaacaacaggcctttgagcagatcaagcaagagattgccagggctgtcgcccttggccccgtccgaatggggcaaggaatcaaaaatatactttatacagctgctggcgaaaaagggcccacctggagcctgtggcagcgagccagcggcgaaactagagggaggccactcggcttctggtccagggcctaccggggatctgaagaaggatacacccctactgagaaggagatcctggcagcctatgaaggcgtgagagctgcttcagaagttatcgggactgagacccagctgttgctggcaccccgccttcctgttctgaattggatgttcaagggaaaaggaagtagctcccaccatgctacagacgctacttggagcaagtggattgccttgatcacgcagcgcgcccgcatggggaacttgaatagaccaggtattctggaggtcattatggactggcctgaaggcaagaagtttgggaccccgcctgctgaagagatcagccgcgccaaggaggctcctccgtacaatgaactgcctgagaacgagaaaacctatgcactttttacagacggaagctgttgcatagtagggaagcacagacggtggaaggcagccgtttggtcacccacaaggcaggtcgcagaagcaaccgaaggcaaaggagagtcatctcagtttgctgaggtcaaggctgtgcagttggccctggacgtagccgagagggagagatggccaatgttgtacgtgtacaccgatagttggatggtggctaacgctctttggggttggctccagcagtgggagcagaataactggcagagaaaagggaagcctatttgggctgccgacctgtggaaggacattgccgcacgaattaaaaatatggtgatcaaggttagacacgtagacgcccacgtaccgaaaaaccgagccaccgaagaacaacagaataatcatcaggttgatagggcagctcggatcgaggttgcccaaattgacctggatcctaggcctaagaagaaaagaaaggtgggtggttctcctaagaaaaagagaaaggtctgagaattc

SEQ ID NO: 1429 - DNA, 2163 bp, synthetic construct
  source 1..2163: mol_type = other DNA; note MG151-123_H178N_cloned_into_tethered_or_untethered_plasmid
gctagcgccaccatgtacccctatgatgtacctgattatgcttctggcggcagcagcggcggctcaagcggaagtgaaacacctggaacttccgaaagcgctacgcctgaatcttctggtggatcttctggcggatcttccgcatgcggcattgctgctgtggatacggacaacattaaacagttgtccgcacttcccgggctgagtgaagatccatccgtggtgggtctgttgcaggtaaaggagcaacaggttcctatcgccacaaagacggtgcacaggcgccagtatcggacgaatagagacagtctgctcccaatacataagcttatacggcaactcgaagatcaaggcgtcatttccaagactcattctccattcaattctcctatctggccagtgagaaaggccagtggggaatggcgcctgacagtggactacagaggacttaatgaggtcactccacccctttccgctgcagtccctgatatgctcgagctgcagtacgagcttgagtctaaagcagctaagtggtacgcaaccatcgatattgccaacgcttttttctcaataccactggccaaagagtgcaggccccagttcgccttcacttggaggggcgtgcagtatacatggaaccggctcccgcagggctggaagcactctccaactatctgtaacggacttattcagacagtgctggagcagggatcagctcccgaacaccttcagtatatcgatgacatagtggtgtggggcgacaccgcagaagaggtgtttacaaaaggtgagcgcataattcaaatcctcctttgcgcaggtttcgcaattaaacgaagcaaagtgaaaggacccgcacaggaaattcagtttctcggtatcaaatggcaggatggccggaggcacatccccacagatgtgatagataagatctctgccatgagcccacctactaacaaaaaagaaacacaatcattcctcggcgtagttggtttctggcggatgcatgtgcccaactatagtctgatcgtctcccctctgtatcatgtcaccaggatgaaaaacgaatttacctggggacccgaacaacaacaggcctttgagcagatcaagcaagagattgccagggctgtcgcccttggccccgtccgaatggggcaaggaatcaaaaatatactttatacagctgctggcgaaaaagggcccacctggagcctgtggcagcgagccagcggcgaaactagagggaggccactcggcttctggtccagggcctaccggggatctgaagaaggatacacccctactgagaaggagatcctggcagcctatgaaggcgtgagagctgcttcagaagttatcgggactgagacccagctgttgctggcaccccgccttcctgttctgaattggatgttcaagggaaaaggaagtagctcccaccatgctacagacgctacttggagcaagtggattgccttgatcacgcagcgcgcccgcatggggaacttgaatagaccaggtattctggaggtcattatggactggcctgaaggcaagaagtttgggaccccgcctgctgaagagatcagccgcgccaaggaggctcctccgtacaatgaactgcctgagaacgagaaaacctatgcactttttacagacggaagctgttgcatagtagggaagcacagacggtggaaggcagccgtttggtcacccacaaggcaggtcgcagaagcaaccgaaggcaaaggagagtcatctcagtttgctgaggtcaaggctgtgcagttggccctggacgtagccgagagggagagatggccaatgttgtacgtgtacaccgatagttggatggtggctaacgctctttggggttggctccagcagtgggagcagaataactggcagagaaaagggaagcctatttgggctgccgacctgtggaaggacattgccgcacgaattaaaaatatggtgatcaaggttagacacgtagacgcccacgtaccgaaaaaccgagccaccgaagaacaacagaataatcatcaggttgatagggcagctcggatcgaggttgcccaaattgacctggatcctaggcctaagaagaaaagaaaggtgggtggttctcctaagaaaaagagaaaggtctgagaattc

SEQ ID NO: 1430 - DNA, 2163 bp, synthetic construct
  source 1..2163: mol_type = other DNA; note MG151-123_G279R_cloned_into_tethered_or_untethered_plasmid
gctagcgccaccatgtacccctatgatgtacctgattatgcttctggcggcagcagcggcggctcaagcggaagtgaaacacctggaacttccgaaagcgctacgcctgaatcttctggtggatcttctggcggatcttccgcatgcggcattgctgctgtggatacggacaacattaaacagttgtccgcacttcccgggctgagtgaagatccatccgtggtgggtctgttgcaggtaaaggagcaacaggttcctatcgccacaaagacggtgcacaggcgccagtatcggacgaatagagacagtctgctcccaatacataagcttatacggcaactcgaagatcaaggcgtcatttccaagactcattctccattcaattctcctatctggccagtgagaaaggccagtggggaatggcgcctgacagtggactacagaggacttaatgaggtcactccacccctttccgctgcagtccctgatatgctcgagctgcagtacgagcttgagtctaaagcagctaagtggtacgcaaccatcgatattgccaacgcttttttctcaataccactggccaaagagtgcaggccccagttcgccttcacttggaggggcgtgcagtatacatggaaccggctcccgcagggctggaagcactctccaactatctgtcatggacttattcagacagtgctggagcagggatcagctcccgaacaccttcagtatatcgatgacatagtggtgtggggcgacaccgcagaagaggtgtttacaaaaggtgagcgcataattcaaatcctcctttgcgcaggtttcgcaattaaacgaagcaaagtgaaaggacccgcacaggaaattcagtttctcggtatcaaatggcaggatggccggaggcacatccccacagatgtgatagataagatctctgccatgagcccacctactaacaaaaaagaaacacaatcattcctcagggtagttggtttctggcggatgcatgtgcccaactatagtctgatcgtctcccctctgtatcatgtcaccaggatgaaaaacgaatttacctggggacccgaacaacaacaggcctttgagcagatcaagcaagagattgccagggctgtcgcccttggccccgtccgaatggggcaaggaatcaaaaatatactttatacagctgctggcgaaaaagggcccacctggagcctgtggcagcgagccagcggcgaaactagagggaggccactcggcttctggtccagggcctaccggggatctgaagaaggatacacccctactgagaaggagatcctggcagcctatgaaggcgtgagagctgcttcagaagttatcgggactgagacccagctgttgctggcaccccgccttcctgttctgaattggatgttcaagggaaaaggaagtagctcccaccatgctacagacgctacttggagcaagtggattgccttgatcacgcagcgcgcccgcatggggaacttgaatagaccaggtattctggaggtcattatggactggcctgaaggcaagaagtttgggaccccgcctgctgaagagatcagccgcgccaaggaggctcctccgtacaatgaactgcctgagaacgagaaaacctatgcactttttacagacggaagctgttgcatagtagggaagcacagacggtggaaggcagccgtttggtcacccacaaggcaggtcgcagaagcaaccgaaggcaaaggagagtcatctcagtttgctgaggtcaaggctgtgcagttggccctggacgtagccgagagggagagatggccaatgttgtacgtgtacaccgatagttggatggtggctaacgctctttggggttggctccagcagtgggagcagaataactggcagagaaaagggaagcctatttgggctgccgacctgtggaaggacattgccgcacgaattaaaaatatggtgatcaaggttagacacgtagacgcccacgtaccgaaaaaccgagccaccgaagaacaacagaataatcatcaggttgatagggcagctcggatcgaggttgcccaaattgacctggatcctaggcctaagaagaaaagaaaggtgggtggttctcctaagaaaaagagaaaggtctgagaattc

SEQ ID NO: 1431 - DNA, 2163 bp, synthetic construct
  source 1..2163: mol_type = other DNA; note MG151-123_G279K_cloned_into_tethered_or_untethered_plasmid
gctagcgccaccatgtacccctatgatgtacctgattatgcttctggcggcagcagcggcggctcaagcggaagtgaaacacctggaacttccgaaagcgctacgcctgaatcttctggtggatcttctggcggatcttccgcatgcggcattgctgctgtggatacggacaacattaaacagttgtccgcacttcccgggctgagtgaagatccatccgtggtgggtctgttgcaggtaaaggagcaacaggttcctatcgccacaaagacggtgcacaggcgccagtatcggacgaatagagacagtctgctcccaatacataagcttatacggcaactcgaagatcaaggcgtcatttccaagactcattctccattcaattctcctatctggccagtgagaaaggccagtggggaatggcgcctgacagtggactacagaggacttaatgaggtcactccacccctttccgctgcagtccctgatatgctcgagctgcagtacgagcttgagtctaaagcagctaagtggtacgcaaccatcgatattgccaacgcttttttctcaataccactggccaaagagtgcaggccccagttcgccttcacttggaggggcgtgcagtatacatggaaccggctcccgcagggctggaagcactctccaactatctgtcatggacttattcagacagtgctggagcagggatcagctcccgaacaccttcagtatatcgatgacatagtggtgtggggcgacaccgcagaagaggtgtttacaaaaggtgagcgcataattcaaatcctcctttgcgcaggtttcgcaattaaacgaagcaaagtgaaaggacccgcacaggaaattcagtttctcggtatcaaatggcaggatggccggaggcacatccccacagatgtgatagataagatctctgccatgagcccacctactaacaaaaaagaaacacaatcattcctcaaggtagttggtttctggcggatgcatgtgcccaactatagtctgatcgtctcccctctgtatcatgtcaccaggatgaaaaacgaatttacctggggacccgaacaacaacaggcctttgagcagatcaagcaagagattgccagggctgtcgcccttggccccgtccgaatggggcaaggaatcaaaaatatactttatacagctgctggcgaaaaagggcccacctggagcctgtggcagcgagccagcggcgaaactagagggaggccactcggcttctggtccagggcctaccggggatctgaagaaggatacacccctactgagaaggagatcctggcagcctatgaaggcgtgagagctgcttcagaagttatcgggactgagacccagctgttgctggcaccccgccttcctgttctgaattggatgttcaagggaaaaggaagtagctcccaccatgctacagacgctacttggagcaagtggattgccttgatcacgcagcgcgcccgcatggggaacttgaatagaccaggtattctggaggtcattatggactggcctgaaggcaagaagtttgggaccccgcctgctgaagagatcagccgcgccaaggaggctcctccgtacaatgaactgcctgagaacgagaaaacctatgcactttttacagacggaagctgttgcatagtagggaagcacagacggtggaaggcagccgtttggtcacccacaaggcaggtcgcagaagcaaccgaaggcaaaggagagtcatctcagtttgctgaggtcaaggctgtgcagttggccctggacgtagccgagagggagagatggccaatgttgtacgtgtacaccgatagttggatggtggctaacgctctttggggttggctccagcagtgggagcagaataactggcagagaaaagggaagcctatttgggctgccgacctgtggaaggacattgccgcacgaattaaaaatatggtgatcaaggttagacacgtagacgcccacgtaccgaaaaaccgagccaccgaagaacaacagaataatcatcaggttgatagggcagctcggatcgaggttgcccaaattgacctggatcctaggcctaagaagaaaagaaaggtgggtggttctcctaagaaaaagagaaaggtctgagaattc

SEQ ID NO: 1432 - skipped

SEQ ID NO: 1433 - DNA, 2172 bp, synthetic construct
  source 1..2172: mol_type = other DNA; note MG151-126_H287F_cloned_into_tethered_or_untethered_plasmid
gctagcgccaccatgtacccctatgatgtacctgattatgcttctggcggcagcagcggcggctcaagcggaagtgaaacacctggaacttccgaaagcgctacgcctgaatcttctggtggatcttctggcggatcttccgcatgcggcatcgccgcagtcgaagcagaagggacgcgccagctgaatactctgcctggtctgagtgagaatccctctgccgtgggccttctgaaagtcgaagagcagagagttcctatcgccacatccacagtacatagaagacagtacagaacaaatagggacgctgttattcctatccataaaatgataagagagcttgagtctcagggggttgtctcaaagactcacagccctttcaattctcccatctggcctgttaggaaatccgacggtgaatggagattgactgtagattacaggggactcaacgaagtgacccctccgctgagtgcagccgtaccagatatgcttgagctgcaatatgaactcgagtctaaagcagccaagtggtatgccaccattgacatagctaacgccttcttttcaattccactcgccgctgagtgtaggccacagtttgccttcacctggaggggagtgcaatatacctggaaccggctgccccaggggtggaagcacagcccaactatttgccatggcctgattcaggctgctctggagaagggtgaggctcccgagcacctgcagtatatcgatgatataattgtctggggcaatacggctacagaagtgtttgaaaagggagaacgaatcattcagatactgcttcaggccggttttgccattaaaaaaagcaaggtgaaagggcccgctcgagagatccaatttctgggcgtgaaatggcaggacgggagaaggcagattccgactgaggtgatcaacaagattactgctatgtccccgcccacaaacaaaaaggaaacccaggccttccttggagctatcggattttggcggatgttcataccggagtactcacagattgtgagccctctctaccttgtcacacgcaaaaaaaacgatttccattggggtccagaacagcagcaagctttcgctcaaatcaagcaggaaatcgctcacgcagttgccctcggacctgtgcgcacgggaccagaggtgaagaatgtcctctacagcgcagcaggaaataacggcctgagttggagcctctggcagaaggtccccggggaaactcggggccggccacttggtttctggtctcggagctatcggggctccgaggcaaattatacccccaccgaaaaagagatcctcgctgcatacgagggtgtccaggctgcttctgaagtgattgggacggaagcacagcttcttttggcaccaagattgccagtgcttggctggatgtttaaaggcaaagtgccctccacccatcatgccactgatgcaacatggagtaagtggatagctctgataacacagcgagcccggatcggcaatcccaataggccaggaatcttggaaattattacaaactggccagaaggagagactttcggcttgagttccgaggaagaggaggaacaagtcacaagagccgaggaggcccctccatataatgagcttcctgaatccgagcgacagtatgctctgtttaccgatggatcatgccggattgtcggggcatctaggaaatggaaggctgctgtatggtctcctacaaggcaggtggcccaggcagccgaaggcgaagggggcagctcacaattcgccgaactgaaggccgtgcagcttgctttggacatcgccgaacgcgaacgctggcctcgcttgtacctttacaccgattcatggatggtggccaatgctctgtggggatggctcgagaggtggaataaggccaactggcaacggcgagggaaacccatctgggctgcagaggagtggaaggacatagcaaccagagttgagaagctgagtgttaaggtgcggcacgtggacgctcacatccccaagagccgcgccaacgaggagcatcacaacaaccagcaagttgaccaggcagccaaaattgaagtatcccaaatcgatctggaccctaggcctaagaagaaaagaaaggtgggtggttctcctaagaaaaagagaaaggtctgagaattc

SEQ ID NO: 1434 - DNA, 2172 bp, synthetic construct
  source 1..2172: mol_type = other DNA; note MG151-126_G179R_cloned_into_tethered_or_untethered_plasmid
gctagcgccaccatgtacccctatgatgtacctgattatgcttctggcggcagcagcggcggctcaagcggaagtgaaacacctggaacttccgaaagcgctacgcctgaatcttctggtggatcttctggcggatcttccgcatgcggcatcgccgcagtcgaagcagaagggacgcgccagctgaatactctgcctggtctgagtgagaatccctctgccgtgggccttctgaaagtcgaagagcagagagttcctatcgccacatccacagtacatagaagacagtacagaacaaatagggacgctgttattcctatccataaaatgataagagagcttgagtctcagggggttgtctcaaagactcacagccctttcaattctcccatctggcctgttaggaaatccgacggtgaatggagattgactgtagattacaggggactcaacgaagtgacccctccgctgagtgcagccgtaccagatatgcttgagctgcaatatgaactcgagtctaaagcagccaagtggtatgccaccattgacatagctaacgccttcttttcaattccactcgccgctgagtgtaggccacagtttgccttcacctggaggggagtgcaatatacctggaaccggctgccccaggggtggaagcacagcccaactatttgccataggctgattcaggctgctctggagaagggtgaggctcccgagcacctgcagtatatcgatgatataattgtctggggcaatacggctacagaagtgtttgaaaagggagaacgaatcattcagatactgcttcaggccggttttgccattaaaaaaagcaaggtgaaagggcccgctcgagagatccaatttctgggcgtgaaatggcaggacgggagaaggcagattccgactgaggtgatcaacaagattactgctatgtccccgcccacaaacaaaaaggaaacccaggccttccttggagctatcggattttggcggatgcacataccggagtactcacagattgtgagccctctctaccttgtcacacgcaaaaaaaacgatttccattggggtccagaacagcagcaagctttcgctcaaatcaagcaggaaatcgctcacgcagttgccctcggacctgtgcgcacgggaccagaggtgaagaatgtcctctacagcgcagcaggaaataacggcctgagttggagcctctggcagaaggtccccggggaaactcggggccggccacttggtttctggtctcggagctatcggggctccgaggcaaattatacccccaccgaaaaagagatcctcgctgcatacgagggtgtccaggctgcttctgaagtgattgggacggaagcacagcttcttttggcaccaagattgccagtgcttggctggatgtttaaaggcaaagtgccctccacccatcatgccactgatgcaacatggagtaagtggatagctctgataacacagcgagcccggatcggcaatcccaataggccaggaatcttggaaattattacaaactggccagaaggagagactttcggcttgagttccgaggaagaggaggaacaagtcacaagagccgaggaggcccctccatataatgagcttcctgaatccgagcgacagtatgctctgtttaccgatggatcatgccggattgtcggggcatctaggaaatggaaggctgctgtatggtctcctacaaggcaggtggcccaggcagccgaaggcgaagggggcagctcacaattcgccgaactgaaggccgtgcagcttgctttggacatcgccgaacgcgaacgctggcctcgcttgtacctttacaccgattcatggatggtggccaatgctctgtggggatggctcgagaggtggaataaggccaactggcaacggcgagggaaacccatctgggctgcagaggagtggaaggacatagcaaccagagttgagaagctgagtgttaaggtgcggcacgtggacgctcacatccccaagagccgcgccaacgaggagcatcacaacaaccagcaagttgaccaggcagccaaaattgaagtatcccaaatcgatctggaccctaggcctaagaagaaaagaaaggtgggtggttctcctaagaaaaagagaaaggtctgagaattc

SEQ ID NO: 1435 - DNA, 2172 bp, synthetic construct
  source 1..2172: mol_type = other DNA; note MG151-126_G179N_cloned_into_tethered_or_untethered_plasmid
gctagcgccaccatgtacccctatgatgtacctgattatgcttctggcggcagcagcggcggctcaagcggaagtgaaacacctggaacttccgaaagcgctacgcctgaatcttctggtggatcttctggcggatcttccgcatgcggcatcgccgcagtcgaagcagaagggacgcgccagctgaatactctgcctggtctgagtgagaatccctctgccgtgggccttctgaaagtcgaagagcagagagttcctatcgccacatccacagtacatagaagacagtacagaacaaatagggacgctgttattcctatccataaaatgataagagagcttgagtctcagggggttgtctcaaagactcacagccctttcaattctcccatctggcctgttaggaaatccgacggtgaatggagattgactgtagattacaggggactcaacgaagtgacccctccgctgagtgcagccgtaccagatatgcttgagctgcaatatgaactcgagtctaaagcagccaagtggtatgccaccattgacatagctaacgccttcttttcaattccactcgccgctgagtgtaggccacagtttgccttcacctggaggggagtgcaatatacctggaaccggctgccccaggggtggaagcacagcccaactatttgccataacctgattcaggctgctctggagaagggtgaggctcccgagcacctgcagtatatcgatgatataattgtctggggcaatacggctacagaagtgtttgaaaagggagaacgaatcattcagatactgcttcaggccggttttgccattaaaaaaagcaaggtgaaagggcccgctcgagagatccaatttctgggcgtgaaatggcaggacgggagaaggcagattccgactgaggtgatcaacaagattactgctatgtccccgcccacaaacaaaaaggaaacccaggccttccttggagctatcggattttggcggatgcacataccggagtactcacagattgtgagccctctctaccttgtcacacgcaaaaaaaacgatttccattggggtccagaacagcagcaagctttcgctcaaatcaagcaggaaatcgctcacgcagttgccctcggacctgtgcgcacgggaccagaggtgaagaatgtcctctacagcgcagcaggaaataacggcctgagttggagcctctggcagaaggtccccggggaaactcggggccggccacttggtttctggtctcggagctatcggggctccgaggcaaattatacccccaccgaaaaagagatcctcgctgcatacgagggtgtccaggctgcttctgaagtgattgggacggaagcacagcttcttttggcaccaagattgccagtgcttggctggatgtttaaaggcaaagtgccctccacccatcatgccactgatgcaacatggagtaagtggatagctctgataacacagcgagcccggatcggcaatcccaataggccaggaatcttggaaattattacaaactggccagaaggagagactttcggcttgagttccgaggaagaggaggaacaagtcacaagagccgaggaggcccctccatataatgagcttcctgaatccgagcgacagtatgctctgtttaccgatggatcatgccggattgtcggggcatctaggaaatggaaggctgctgtatggtctcctacaaggcaggtggcccaggcagccgaaggcgaagggggcagctcacaattcgccgaactgaaggccgtgcagcttgctttggacatcgccgaacgcgaacgctggcctcgcttgtacctttacaccgattcatggatggtggccaatgctctgtggggatggctcgagaggtggaataaggccaactggcaacggcgagggaaacccatctgggctgcagaggagtggaaggacatagcaaccagagttgagaagctgagtgttaaggtgcggcacgtggacgctcacatccccaagagccgcgccaacgaggagcatcacaacaaccagcaagttgaccaggcagccaaaattgaagtatcccaaatcgatctggaccctaggcctaagaagaaaagaaaggtgggtggttctcctaagaaaaagagaaaggtctgagaattc

SEQ ID NO: 1436 - DNA, 2172 bp, synthetic construct
  source 1..2172: mol_type = other DNA; note MG151-126_A280R_cloned_into_tethered_or_untethered_plasmid
gctagcgccaccatgtacccctatgatgtacctgattatgcttctggcggcagcagcggcggctcaagcggaagtgaaacacctggaacttccgaaagcgctacgcctgaatcttctggtggatcttctggcggatcttccgcatgcggcatcgccgcagtcgaagcagaagggacgcgccagctgaatactctgcctggtctgagtgagaatccctctgccgtgggccttctgaaagtcgaagagcagagagttcctatcgccacatccacagtacatagaagacagtacagaacaaatagggacgctgttattcctatccataaaatgataagagagcttgagtctcagggggttgtctcaaagactcacagccctttcaattctcccatctggcctgttaggaaatccgacggtgaatggagattgactgtagattacaggggactcaacgaagtgacccctccgctgagtgcagccgtaccagatatgcttgagctgcaatatgaactcgagtctaaagcagccaagtggtatgccaccattgacatagctaacgccttcttttcaattccactcgccgctgagtgtaggccacagtttgccttcacctggaggggagtgcaatatacctggaaccggctgccccaggggtggaagcacagcccaactatttgccatggcctgattcaggctgctctggagaagggtgaggctcccgagcacctgcagtatatcgatgatataattgtctggggcaatacggctacagaagtgtttgaaaagggagaacgaatcattcagatactgcttcaggccggttttgccattaaaaaaagcaaggtgaaagggcccgctcgagagatccaatttctgggcgtgaaatggcaggacgggagaaggcagattccgactgaggtgatcaacaagattactgctatgtccccgcccacaaacaaaaaggaaacccaggccttccttggaaggatcggattttggcggatgcacataccggagtactcacagattgtgagccctctctaccttgtcacacgcaaaaaaaacgatttccattggggtccagaacagcagcaagctttcgctcaaatcaagcaggaaatcgctcacgcagttgccctcggacctgtgcgcacgggaccagaggtgaagaatgtcctctacagcgcagcaggaaataacggcctgagttggagcctctggcagaaggtccccggggaaactcggggccggccacttggtttctggtctcggagctatcggggctccgaggcaaattatacccccaccgaaaaagagatcctcgctgcatacgagggtgtccaggctgcttctgaagtgattgggacggaagcacagcttcttttggcaccaagattgccagtgcttggctggatgtttaaaggcaaagtgccctccacccatcatgccactgatgcaacatggagtaagtggatagctctgataacacagcgagcccggatcggcaatcccaataggccaggaatcttggaaattattacaaactggccagaaggagagactttcggcttgagttccgaggaagaggaggaacaagtcacaagagccgaggaggcccctccatataatgagcttcctgaatccgagcgacagtatgctctgtttaccgatggatcatgccggattgtcggggcatctaggaaatggaaggctgctgtatggtctcctacaaggcaggtggcccaggcagccgaaggcgaagggggcagctcacaattcgccgaactgaaggccgtgcagcttgctttggacatcgccgaacgcgaacgctggcctcgcttgtacctttacaccgattcatggatggtggccaatgctctgtggggatggctcgagaggtggaataaggccaactggcaacggcgagggaaacccatctgggctgcagaggagtggaaggacatagcaaccagagttgagaagctgagtgttaaggtgcggcacgtggacgctcacatccccaagagccgcgccaacgaggagcatcacaacaaccagcaagttgaccaggcagccaaaattgaagtatcccaaatcgatctggaccctaggcctaagaagaaaagaaaggtgggtggttctcctaagaaaaagagaaaggtctgagaattc

SEQ ID NO: 1437 - DNA, 2172 bp, synthetic construct
  source 1..2172: mol_type = other DNA; note MG151-126_A280K_cloned_into_tethered_or_untethered_plasmid
gctagcgccaccatgtacccctatgatgtacctgattatgcttctggcggcagcagcggcggctcaagcggaagtgaaacacctggaacttccgaaagcgctacgcctgaatcttctggtggatcttctggcggatcttccgcatgcggcatcgccgcagtcgaagcagaagggacgcgccagctgaatactctgcctggtctgagtgagaatccctctgccgtgggccttctgaaagtcgaagagcagagagttcctatcgccacatccacagtacatagaagacagtacagaacaaatagggacgctgttattcctatccataaaatgataagagagcttgagtctcagggggttgtctcaaagactcacagccctttcaattctcccatctggcctgttaggaaatccgacggtgaatggagattgactgtagattacaggggactcaacgaagtgacccctccgctgagtgcagccgtaccagatatgcttgagctgcaatatgaactcgagtctaaagcagccaagtggtatgccaccattgacatagctaacgccttcttttcaattccactcgccgctgagtgtaggccacagtttgccttcacctggaggggagtgcaatatacctggaaccggctgccccaggggtggaagcacagcccaactatttgccatggcctgattcaggctgctctggagaagggtgaggctcccgagcacctgcagtatatcgatgatataattgtctggggcaatacggctacagaagtgtttgaaaagggagaacgaatcattcagatactgcttcaggccggttttgccattaaaaaaagcaaggtgaaagggcccgctcgagagatccaatttctgggcgtgaaatggcaggacgggagaaggcagattccgactgaggtgatcaacaagattactgctatgtccccgcccacaaacaaaaaggaaacccaggccttccttggaaagatcggattttggcggatgcacataccggagtactcacagattgtgagccctctctaccttgtcacacgcaaaaaaaacgatttccattggggtccagaacagcagcaagctttcgctcaaatcaagcaggaaatcgctcacgcagttgccctcggacctgtgcgcacgggaccagaggtgaagaatgtcctctacagcgcagcaggaaataacggcctgagttggagcctctggcagaaggtccccggggaaactcggggccggccacttggtttctggtctcggagctatcggggctccgaggcaaattatacccccaccgaaaaagagatcctcgctgcatacgagggtgtccaggctgcttctgaagtgattgggacggaagcacagcttcttttggcaccaagattgccagtgcttggctggatgtttaaaggcaaagtgccctccacccatcatgccactgatgcaacatggagtaagtggatagctctgataacacagcgagcccggatcggcaatcccaataggccaggaatcttggaaattattacaaactggccagaaggagagactttcggcttgagttccgaggaagaggaggaacaagtcacaagagccgaggaggcccctccatataatgagcttcctgaatccgagcgacagtatgctctgtttaccgatggatcatgccggattgtcggggcatctaggaaatggaaggctgctgtatggtctcctacaaggcaggtggcccaggcagccgaaggcgaagggggcagctcacaattcgccgaactgaaggccgtgcagcttgctttggacatcgccgaacgcgaacgctggcctcgcttgtacctttacaccgattcatggatggtggccaatgctctgtggggatggctcgagaggtggaataaggccaactggcaacggcgagggaaacccatctgggctgcagaggagtggaaggacatagcaaccagagttgagaagctgagtgttaaggtgcggcacgtggacgctcacatccccaagagccgcgccaacgaggagcatcacaacaaccagcaagttgaccaggcagccaaaattgaagtatcccaaatcgatctggaccctaggcctaagaagaaaagaaaggtgggtggttctcctaagaaaaagagaaaggtctgagaattc

SEQ ID NO: 1438 - DNA, 2172 bp, synthetic construct
  source 1..2172: mol_type = other DNA; note MG151-126_A276R_cloned_into_tethered_or_untethered_plasmid
gctagcgccaccatgtacccctatgatgtacctgattatgcttctggcggcagcagcggcggctcaagcggaagtgaaacacctggaacttccgaaagcgctacgcctgaatcttctggtggatcttctggcggatcttccgcatgcggcatcgccgcagtcgaagcagaagggacgcgccagctgaatactctgcctggtctgagtgagaatccctctgccgtgggccttctgaaagtcgaagagcagagagttcctatcgccacatccacagtacatagaagacagtacagaacaaatagggacgctgttattcctatccataaaatgataagagagcttgagtctcagggggttgtctcaaagactcacagccctttcaattctcccatctggcctgttaggaaatccgacggtgaatggagattgactgtagattacaggggactcaacgaagtgacccctccgctgagtgcagccgtaccagatatgcttgagctgcaatatgaactcgagtctaaagcagccaagtggtatgccaccattgacatagctaacgccttcttttcaattccactcgccgctgagtgtaggccacagtttgccttcacctggaggggagtgcaatatacctggaaccggctgccccaggggtggaagcacagcccaactatttgccatggcctgattcaggctgctctggagaagggtgaggctcccgagcacctgcagtatatcgatgatataattgtctggggcaatacggctacagaagtgtttgaaaagggagaacgaatcattcagatactgcttcaggccggttttgccattaaaaaaagcaaggtgaaagggcccgctcgagagatccaatttctgggcgtgaaatggcaggacgggagaaggcagattccgactgaggtgatcaacaagattactgctatgtccccgcccacaaacaaaaaggaaacccagaggttccttggagctatcggattttggcggatgcacataccggagtactcacagattgtgagccctctctaccttgtcacacgcaaaaaaaacgatttccattggggtccagaacagcagcaagctttcgctcaaatcaagcaggaaatcgctcacgcagttgccctcggacctgtgcgcacgggaccagaggtgaagaatgtcctctacagcgcagcaggaaataacggcctgagttggagcctctggcagaaggtccccggggaaactcggggccggccacttggtttctggtctcggagctatcggggctccgaggcaaattatacccccaccgaaaaagagatcctcgctgcatacgagggtgtccaggctgcttctgaagtgattgggacggaagcacagcttcttttggcaccaagattgccagtgcttggctggatgtttaaaggcaaagtgccctccacccatcatgccactgatgcaacatggagtaagtggatagctctgataacacagcgagcccggatcggcaatcccaataggccaggaatcttggaaattattacaaactggccagaaggagagactttcggcttgagttccgaggaagaggaggaacaagtcacaagagccgaggaggcccctccatataatgagcttcctgaatccgagcgacagtatgctctgtttaccgatggatcatgccggattgtcggggcatctaggaaatggaaggctgctgtatggtctcctacaaggcaggtggcccaggcagccgaaggcgaagggggcagctcacaattcgccgaactgaaggccgtgcagcttgctttggacatcgccgaacgcgaacgctggcctcgcttgtacctttacaccgattcatggatggtggccaatgctctgtggggatggctcgagaggtggaataaggccaactggcaacggcgagggaaacccatctgggctgcagaggagtggaaggacatagcaaccagagttgagaagctgagtgttaaggtgcggcacgtggacgctcacatccccaagagccgcgccaacgaggagcatcacaacaaccagcaagttgaccaggcagccaaaattgaagtatcccaaatcgatctggaccctaggcctaagaagaaaagaaaggtgggtggttctcctaagaaaaagagaaaggtctgagaattc

SEQ ID NO: 1439 - DNA, 1620 bp, synthetic construct
  source 1..1620: mol_type = other DNA; note MG153-18_P242R_cloned_into_tethered_or_untethered_plasmid
gctagcgccaccatgtacccctatgatgtacctgattatgcttctggcggcagcagcggcggctcaagcggaagtgaaacacctggaacttccgaaagcgctacgcctgaatcttctggtggatcttctggcggatcttccgcatgcatgaggtcacaagagggaagacggcagcagaaagctcctgagggcgcgtacttgtgggaagagatggtgaagccatggggtactactggaggaccaagcccgtcttccgctcagggaggcgcgacccctcgcggggggcagggcagtggtttgatggagcaggtggttgagaggagcaacatgctggctgcgctgcgtcgggttgaaagaaatggaggcgcaccgggagtcgacggcatacccaccgagaggctccgcgatcagattcgagccgagtggccaagaatcagggaagaacttcttgccggcacttaccgccctaaaccagttcgccgagtggaaatcccgaagcctggaggaggcaagagactgctgggtatccccacagcggtagaccgccttatccaacaagctctcctccaggtgctgactcctatctttgatcctcaatttagcgaagcctcttatggcttccgacccggcagacgggcccatgacgccgtgaggaaggccagacaatatgtcgaagagggttacgagtgggccgttgacttggatattgagaagtttttcgatcaggtgaaccatgacattttgatggcccgggtcgcgcgaaaggtgactgataagcgcgttctgactttgatccgcaggtatcttcaggcaggtgtcatggtcaacggcgtggttatcgagaccggggaaggcactcctcagggtggtaggttgagccccttactggcgaatatccttcttgatgaccttgacaaggagcttgaaaaacgggggcacaaattcgtgaggtacgcagacgactgtaatatatatgttaagagcaagcgcgctggggaacgagttatggctagtatcagaaaattcctgcaggaacggttgaagcttaaaattaacgagcagaagtctgccgtcgatcggccctggaagctgaaattcctgggtttctccatgcataaacgtaaaaccggtgaaattctcattcggcttgctccccaggctatagagcgtgttaaaggcaaaatccgggagattacagcacgaaacaagcctgtaagtatggccgagaggatcgaacgactgaatacatacttaggaggatggatcggttattttgcattggccgagacccccagcgtctttgaggagatcgaagggtggatgcgacgacggctccggatgtatttgtggaagcagtggaagcgggtccgtactcgctatcgcgaactcagagctcttggcttatctgaatgggtcgtgcaccagttcgctaacgcccgtaaaggtccctggcggatggcccacgggcctatgaatcgagccttaggcaacgcctattggcaaagccagggtcttatgtcactgaccgagcgataccagagcctgcgacaggctcctaggcctaagaagaaaagaaaggtgggtggttctcctaagaaaaagagaaaggtctgagaattc

SEQ ID NO: 1440 - DNA, 1620 bp, synthetic construct
  source 1..1620: mol_type = other DNA; note MG153-18_G119R_cloned_into_tethered_or_untethered_plasmid
gctagcgccaccatgtacccctatgatgtacctgattatgcttctggcggcagcagcggcggctcaagcggaagtgaaacacctggaacttccgaaagcgctacgcctgaatcttctggtggatcttctggcggatcttccgcatgcatgaggtcacaagagggaagacggcagcagaaagctcctgagggcgcgtacttgtgggaagagatggtgaagccatggggtactactggaggaccaagcccgtcttccgctcagggaggcgcgacccctcgcggggggcagggcagtggtttgatggagcaggtggttgagaggagcaacatgctggctgcgctgcgtcgggttgaaagaaatggaggcgcaccgggagtcgacggcatacccaccgagaggctccgcgatcagattcgagccgagtggccaagaatcagggaagaacttcttgccggcacttaccgccctaaaccagttcgccgagtggaaatcccgaagcctaggggaggcaagagactgctgggtatccccacagcggtagaccgccttatccaacaagctctcctccaggtgctgactcctatctttgatcctcaatttagcgaagcctcttatggcttccgacccggcagacgggcccatgacgccgtgaggaaggccagacaatatgtcgaagagggttacgagtgggccgttgacttggatattgagaagtttttcgatcaggtgaaccatgacattttgatggcccgggtcgcgcgaaaggtgactgataagcgcgttctgactttgatccgcaggtatcttcaggcaggtgtcatggtcaacggcgtggttatcgagaccggggaaggcactcctcagggtggtcccttgagccccttactggcgaatatccttcttgatgaccttgacaaggagcttgaaaaacgggggcacaaattcgtgaggtacgcagacgactgtaatatatatgttaagagcaagcgcgctggggaacgagttatggctagtatcagaaaattcctgcaggaacggttgaagcttaaaattaacgagcagaagtctgccgtcgatcggccctggaagctgaaattcctgggtttctccatgcataaacgtaaaaccggtgaaattctcattcggcttgctccccaggctatagagcgtgttaaaggcaaaatccgggagattacagcacgaaacaagcctgtaagtatggccgagaggatcgaacgactgaatacatacttaggaggatggatcggttattttgcattggccgagacccccagcgtctttgaggagatcgaagggtggatgcgacgacggctccggatgtatttgtggaagcagtggaagcgggtccgtactcgctatcgcgaactcagagctcttggcttatctgaatgggtcgtgcaccagttcgctaacgcccgtaaaggtccctggcggatggcccacgggcctatgaatcgagccttaggcaacgcctattggcaaagccagggtcttatgtcactgaccgagcgataccagagcctgcgacaggctcctaggcctaagaagaaaagaaaggtgggtggttctcctaagaaaaagagaaaggtctgagaattc

SEQ ID NO: 1441 - DNA, 1620 bp, synthetic construct
  source 1..1620: mol_type = other DNA; note MG153-18_G119R_P242R_cloned_into_tethered_or_untethered_pla smid
gctagcgccaccatgtacccctatgatgtacctgattatgcttctggcggcagcagcggcggctcaagcggaagtgaaacacctggaacttccgaaagcgctacgcctgaatcttctggtggatcttctggcggatcttccgcatgcatgaggtcacaagagggaagacggcagcagaaagctcctgagggcgcgtacttgtgggaagagatggtgaagccatggggtactactggaggaccaagcccgtcttccgctcagggaggcgcgacccctcgcggggggcagggcagtggtttgatggagcaggtggttgagaggagcaacatgctggctgcgctgcgtcgggttgaaagaaatggaggcgcaccgggagtcgacggcatacccaccgagaggctccgcgatcagattcgagccgagtggccaagaatcagggaagaacttcttgccggcacttaccgccctaaaccagttcgccgagtggaaatcccgaagcctaggggaggcaagagactgctgggtatccccacagcggtagaccgccttatccaacaagctctcctccaggtgctgactcctatctttgatcctcaatttagcgaagcctcttatggcttccgacccggcagacgggcccatgacgccgtgaggaaggccagacaatatgtcgaagagggttacgagtgggccgttgacttggatattgagaagtttttcgatcaggtgaaccatgacattttgatggcccgggtcgcgcgaaaggtgactgataagcgcgttctgactttgatccgcaggtatcttcaggcaggtgtcatggtcaacggcgtggttatcgagaccggggaaggcactcctcagggtggtaggttgagccccttactggcgaatatccttcttgatgaccttgacaaggagcttgaaaaacgggggcacaaattcgtgaggtacgcagacgactgtaatatatatgttaagagcaagcgcgctggggaacgagttatggctagtatcagaaaattcctgcaggaacggttgaagcttaaaattaacgagcagaagtctgccgtcgatcggccctggaagctgaaattcctgggtttctccatgcataaacgtaaaaccggtgaaattctcattcggcttgctccccaggctatagagcgtgttaaaggcaaaatccgggagattacagcacgaaacaagcctgtaagtatggccgagaggatcgaacgactgaatacatacttaggaggatggatcggttattttgcattggccgagacccccagcgtctttgaggagatcgaagggtggatgcgacgacggctccggatgtatttgtggaagcagtggaagcgggtccgtactcgctatcgcgaactcagagctcttggcttatctgaatgggtcgtgcaccagttcgctaacgcccgtaaaggtccctggcggatggcccacgggcctatgaatcgagccttaggcaacgcctattggcaaagccagggtcttatgtcactgaccgagcgataccagagcctgcgacaggctcctaggcctaagaagaaaagaaaggtgggtggttctcctaagaaaaagagaaaggtctgagaattc

SEQ ID NO: 1442 - DNA, 1581 bp, synthetic construct
  source 1..1581: mol_type = other DNA; note MG153-20_N55R_cloned_into_tethered_or_untethered_plasmid
gctagcgccaccatgtacccctatgatgtacctgattatgcttctggcggcagcagcggcggctcaagcggaagtgaaacacctggaacttccgaaagcgctacgcctgaatcttctggtggatcttctggcggatcttccgcatgcatgggtgaggtgagggtgaagcccgggggcactcctagagggcgcagcatcgaccggcaggatctgaaactcattctgcggcgggagaagtacagaatggacttaatggaacagatgctttccagagagaatatgttgcaggccctgcgcagggtggaagcaaggaaaggggcagccggtatcgactccgtatcaactaggcagctgagggcacacgtggtccagcactgggaaacaactaaggcgaaactgctggccgggacatataagccctcacccgttaggcgcgttgagatacctaagccagatggcggtgtacgactgttaggaatcccaactgtgatggatagactcatacagcaggctatccttcaggtcctgacaccaatcttcgacccaacattttctcctcattcttatggatttagacccaaacgacggggccacgatgccgttcgccaggcacaggagtatattcgggaggggtaccggtacgttgtggacattgatctggaaaagttcttcgaccgagtcaaccatgatatattgatgtcccgggtcgcccggaaggtgaaagacaagcgagtgcttaagctcattagggcatacctcaaagccggcattatggccgagggaatccgagtcagatctgaagaaggtaccccgcagggtggtcccctgtccccccttctcgccaacatcctcctggatgacctggataaggagctcgaaagaaggcaactgcggttcgtgcgttatgctgacgattgtaatatctatgtcaagacccgcagagctggggagcgcgtgaagcggtccattacaaagtacctggagaaaaaattaaaactcaaggtcaatgaagcgaagagtgccgtggaccgtccttggaagaggaaattcctcgggttctcttttacgtttcataaggaagcgcggatcaggatcgcgcctaagtccctgaaaagggtgaaagacaaaattcggagtctgacaaggggtaatcacctgacctccatggaaaccattatcgaggacttgaatagatacctgatgggttggatggggtattacgcccttatggacaccccatctacattaaaagcccttgatgagtggatccgtcggcggttgaggctggtcctttggtctcgttggaaacgcgtccgaacaaggtatcgcatgttacgggctttggggctgcccgaacgcgatgttcacaagcttgcgaatacacgcaagggcgcgtggagaacttccaaaaccccccagatgcataaagctctcggtatagcgtattggaagagccaagggctcatgtccctcaccgaacgatatttcgaaatcagacagggttggaggacagcacctaggcctaagaagaaaagaaaggtgggtggttctcctaagaaaaagagaaaggtctgagaattc

SEQ ID NO: 1443 - DNA, 1581 bp, synthetic construct
  source 1..1581: mol_type = other DNA; note MG153-20_P226R_cloned_into_tethered_or_untethered_plasmid
gctagcgccaccatgtacccctatgatgtacctgattatgcttctggcggcagcagcggcggctcaagcggaagtgaaacacctggaacttccgaaagcgctacgcctgaatcttctggtggatcttctggcggatcttccgcatgcatgggtgaggtgagggtgaagcccgggggcactcctagagggcgcagcatcgaccggcaggatctgaaactcattctgcggcgggagaagtacagaatggacttaatggaacagatgctttccagagagaatatgttgcaggccctgcgcagggtggaagcaaacaaaggggcagccggtatcgactccgtatcaactaggcagctgagggcacacgtggtccagcactgggaaacaactaaggcgaaactgctggccgggacatataagccctcacccgttaggcgcgttgagatacctaagccagatggcggtgtacgactgttaggaatcccaactgtgatggatagactcatacagcaggctatccttcaggtcctgacaccaatcttcgacccaacattttctcctcattcttatggatttagacccaaacgacggggccacgatgccgttcgccaggcacaggagtatattcgggaggggtaccggtacgttgtggacattgatctggaaaagttcttcgaccgagtcaaccatgatatattgatgtcccgggtcgcccggaaggtgaaagacaagcgagtgcttaagctcattagggcatacctcaaagccggcattatggccgagggaatccgagtcagatctgaagaaggtaccccgcagggtggtaggctgtccccccttctcgccaacatcctcctggatgacctggataaggagctcgaaagaaggcaactgcggttcgtgcgttatgctgacgattgtaatatctatgtcaagacccgcagagctggggagcgcgtgaagcggtccattacaaagtacctggagaaaaaattaaaactcaaggtcaatgaagcgaagagtgccgtggaccgtccttggaagaggaaattcctcgggttctcttttacgtttcataaggaagcgcggatcaggatcgcgcctaagtccctgaaaagggtgaaagacaaaattcggagtctgacaaggggtaatcacctgacctccatggaaaccattatcgaggacttgaatagatacctgatgggttggatggggtattacgcccttatggacaccccatctacattaaaagcccttgatgagtggatccgtcggcggttgaggctggtcctttggtctcgttggaaacgcgtccgaacaaggtatcgcatgttacgggctttggggctgcccgaacgcgatgttcacaagcttgcgaatacacgcaagggcgcgtggagaacttccaaaaccccccagatgcataaagctctcggtatagcgtattggaagagccaagggctcatgtccctcaccgaacgatatttcgaaatcagacagggttggaggacagcacctaggcctaagaagaaaagaaaggtgggtggttctcctaagaaaaagagaaaggtctgagaattc

SEQ ID NO: 1444 - DNA, 1581 bp, synthetic construct
  source 1..1581: mol_type = other DNA; note MG153-20_N55R_P226R_cloned_into_tethered_or_untethered_plas mid
gctagcgccaccatgtacccctatgatgtacctgattatgcttctggcggcagcagcggcggctcaagcggaagtgaaacacctggaacttccgaaagcgctacgcctgaatcttctggtggatcttctggcggatcttccgcatgcatgggtgaggtgagggtgaagcccgggggcactcctagagggcgcagcatcgaccggcaggatctgaaactcattctgcggcgggagaagtacagaatggacttaatggaacagatgctttccagagagaatatgttgcaggccctgcgcagggtggaagcaaggaaaggggcagccggtatcgactccgtatcaactaggcagctgagggcacacgtggtccagcactgggaaacaactaaggcgaaactgctggccgggacatataagccctcacccgttaggcgcgttgagatacctaagccagatggcggtgtacgactgttaggaatcccaactgtgatggatagactcatacagcaggctatccttcaggtcctgacaccaatcttcgacccaacattttctcctcattcttatggatttagacccaaacgacggggccacgatgccgttcgccaggcacaggagtatattcgggaggggtaccggtacgttgtggacattgatctggaaaagttcttcgaccgagtcaaccatgatatattgatgtcccgggtcgcccggaaggtgaaagacaagcgagtgcttaagctcattagggcatacctcaaagccggcattatggccgagggaatccgagtcagatctgaagaaggtaccccgcagggtggtaggctgtccccccttctcgccaacatcctcctggatgacctggataaggagctcgaaagaaggcaactgcggttcgtgcgttatgctgacgattgtaatatctatgtcaagacccgcagagctggggagcgcgtgaagcggtccattacaaagtacctggagaaaaaattaaaactcaaggtcaatgaagcgaagagtgccgtggaccgtccttggaagaggaaattcctcgggttctcttttacgtttcataaggaagcgcggatcaggatcgcgcctaagtccctgaaaagggtgaaagacaaaattcggagtctgacaaggggtaatcacctgacctccatggaaaccattatcgaggacttgaatagatacctgatgggttggatggggtattacgcccttatggacaccccatctacattaaaagcccttgatgagtggatccgtcggcggttgaggctggtcctttggtctcgttggaaacgcgtccgaacaaggtatcgcatgttacgggctttggggctgcccgaacgcgatgttcacaagcttgcgaatacacgcaagggcgcgtggagaacttccaaaaccccccagatgcataaagctctcggtatagcgtattggaagagccaagggctcatgtccctcaccgaacgatatttcgaaatcagacagggttggaggacagcacctaggcctaagaagaaaagaaaggtgggtggttctcctaagaaaaagagaaaggtctgagaattc

SEQ ID NO: 1445 - DNA, 759 bp, synthetic construct
  source 1..759: mol_type = other DNA; note = MG160-473_F231R_cloned_into_tethered_plasmid
atggaagcctggaaacataagtttgagatcaagaaggacaggtgggtccacgtaccaagcaaggacatggtgatcttcgggaaaaagttgcacaaatttatcagaagaaagtggaatcctcccttttactactatcacctccggaacgggggtcatgttattgccgctaagaatcacaaacataatgactttttcagtgctatagatatatctaacttcttcgaatcaacatcacaaagcagggtgacccgcgagcttaagactatcctcccatataatcaggcccgggaggtcgcaaagatttcaacggtccgagtgcccggaagcaaggataaaaagttctcaatcccttatggctacccacagtcccctatacttgctagtttctgtttgcgaaactcctacgtaggcaatgtgctggacagcatcaataaaggtggacttatcctggtgtctgtctatatggatgatatagtgctgtcttccaaagacctcaatgtgttgaacgatgcatttaatctgatttgcaacgcccttaaaaaaagtcactaccagattaacattgacaaaacccagcccccgagcgaaaagatcagggttttcaacctggagctgtctcatgaccagatcaaggtgtgctccgatcgcctcattcagttcattcaggcctacgcaaaaacacagaacgagagggaacggaaaggcatcgctgcatatattagaagtgttaaccctcaacaagccaatctgcactttccc

SEQ ID NO: 1446 - DNA, 759 bp, synthetic construct
  source 1..759: mol_type = other DNA; note = MG160-473_F231K_cloned_into_tethered_plasmid
atggaagcctggaaacataagtttgagatcaagaaggacaggtgggtccacgtaccaagcaaggacatggtgatcttcgggaaaaagttgcacaaatttatcagaagaaagtggaatcctcccttttactactatcacctccggaacgggggtcatgttattgccgctaagaatcacaaacataatgactttttcagtgctatagatatatctaacttcttcgaatcaacatcacaaagcagggtgacccgcgagcttaagactatcctcccatataatcaggcccgggaggtcgcaaagatttcaacggtccgagtgcccggaagcaaggataaaaagttctcaatcccttatggctacccacagtcccctatacttgctagtttctgtttgcgaaactcctacgtaggcaatgtgctggacagcatcaataaaggtggacttatcctggtgtctgtctatatggatgatatagtgctgtcttccaaagacctcaatgtgttgaacgatgcatttaatctgatttgcaacgcccttaaaaaaagtcactaccagattaacattgacaaaacccagcccccgagcgaaaagatcagggttttcaacctggagctgtctcatgaccagatcaaggtgtgctccgatcgcctcattcagttcattcaggcctacgcaaaaacacagaacgagaaggaacggaaaggcatcgctgcatatattagaagtgttaaccctcaacaagccaatctgcactttccc

SEQ ID NO: 1447 - DNA, 1629 bp, synthetic construct
  source 1..1629: mol_type = other DNA; note MG151-98-H171N,K297P-166AA_cloned_into_tethered_or_untether ed_plasmid
gctagcgccaccatgtacccctatgatgtacctgattatgcttctggcggcagcagcggcggctcaagcggaagtgaaacacctggaacttccgaaagcgctacgcctgaatcttctggtggatcttctggcggatcttccgcatgcgacaatattaagcaattatctgtgttgcctggactgtccgaggacccttccgcagtcggcttgcttcaggtgaaagagcagcaggtgcctattgcgactaaggcagttcatcgcagacagtataggacaaatcgggactcattattaccaattcacaaattgatccggcagctggaaagtcagggcgtcatcagcagaacccattcccccttcaacagccccatttggcctgtgaggaaggcctcaggcgaatggcgactgaccgtggactacagggggttgaatgaagtcacccctccgttaagtgcagccgtgccggatatgctggaattgcagtatgagctggaatccaaagcagctaaatggtatgctactatcgacatagccaatgcattcttttccatccctcttgccagggagtgtaggccccagttcgcctttacatggaggggcatccaatatacttggaatcgcctgcctcagggttggaagcatagtcccacaatctgcaacggcctcatccaaactgtgctcgagcaggggagcgcacctgagcacctgcagtacattgacgatattgtggtgtggggcgacaccgccgaggacgtgttcaagaaaggagagcaaattatacagatcttgctgcaggccggcttcgcaatcaaacgaagcaaggtgaaggggcccgctcaggagatccagttcttaggcattaaatggcaggacggccgccgccacatcccagcagatgtcatcgataagatcacagcaatgtcaccccccattaacaaaaaagaaacgcagtcttttctgggcgtagttggattttggaggatgcacgtcccaaactactcccttattgtgtcaccattgtatcaggtgactcgtcccaaaaatgacttcacctggggacctgaacagcagcaggcatttgagcagattaaacatgaaatcgcccgggccgtagcactgggaccggtaaggacaggccaggatgtgaaaaacatcttatacacagctgctggcgaaaaaggtcctacatggagcctgtggcagcgtacttccggtgagactagggggcgccctctcgggttctggagccgggcttaccgggggtccgaggaatgctataccccaactgaaaaagaaatactcgcagcatatgaaggtgtgcgagcggcaagtgaagtggttggaactgagacccagctcttgctggcaccccgcctgccagtgctcaactggatgtttaaggggaaaataccctccacccaccacgcgaccgacgcaacctggtctaagtggattgcactcattacacaacgcgcccggatgggcaacttctccaggccgggcatattggaggtcataatggactggccggagggaaagaaattcgagacctcccctggcgaacctaggcctaagaagaaaagaaaggtgggtggttctcctaagaaaaagagaaaggtctgagaattc

SEQ ID NO: 1448 - RNA, 107 nt, synthetic construct
  source 1..107: mol_type = other RNA; note = scaffold_sequence_MG71-2_original_scaffold
gtttgagagtgagaaatcacgagttcaaaaaacatgatttattcaaaccgtcttcttcggaaggccccacagtgtgtggacagtaaagcttgcttcggcaagctttt

SEQ ID NO: 1449 - RNA, 85 nt, synthetic construct
  source 1..85: mol_type = other RNA; note = scaffold_sequence_MG71-2_D2_scaffold
gtttgagagtgagaaatcacgagttcaaaaaacatgatttattcaaaccgtcttcttcggaaggccccacagtgtgtggacagtt

SEQ ID NO: 1450 - RNA, 79 nt, synthetic construct
  source 1..79: mol_type = other RNA; note = scaffold_sequence_MG71-2_D2C2_scaffold
gtttgagagtgagaaatcacgagttcaaaaaacatgatttattcaaaccgtcttcttcggaaggccccacagtgtgtgg

SEQ ID NO: 1451 - RNA, 142 nt, synthetic construct
  source 1..142: mol_type = other RNA; note chemically_modified_guide_5nt_change_PBS_8_D2_scaffold_AAVS 1_71-2_target
  modified_base 1..3: mod_base = OTHER; note = 2'O-methyl ribonucleotide
  modified_base 1..4: mod_base = OTHER; note = phosphorothioate linkage
  modified_base 140..142: mod_base = OTHER; note = 2'O-methyl ribonucleotide
  modified_base 139..142: mod_base = OTHER; note = phosphorothioate linkage
tctgggagagggtagcgcagggtggtttgagagtgagaaatcacgagttcaaaaaacatgatttattcaaaccgtcttcttcggaaggccccacagtgtgtggacagtttgcccggttctcagtgtagcgcctgcgcttttt

SEQ ID NO: 1452 - RNA, 144 nt, synthetic construct
  source 1..144: mol_type = other RNA; note chemically_modified_guide_5nt_change_PBS_10_D2_scaffold_AAV S1_71-2_target
  modified_base 1..3: mod_base = OTHER; note = 2'O-methyl ribonucleotide
  modified_base 1..4: mod_base = OTHER; note = phosphorothioate linkage
  modified_base 142..144: mod_base = OTHER; note = 2'O-methyl ribonucleotide
  modified_base 141..144: mod_base = OTHER; note = phosphorothioate linkage
tctgggagagggtagcgcagggtggtttgagagtgagaaatcacgagttcaaaaaacatgatttattcaaaccgtcttcttcggaaggccccacagtgtgtggacagtttgcccggttctcagtgtagcgcctgcgctactttt

SEQ ID NO: 1453 - RNA, 147 nt, synthetic construct
  source 1..147: mol_type = other RNA; note chemically_modified_guide_5nt_change_PBS_13_D2_scaffold_AAV S1_71-2_target
  modified_base 1..3: mod_base = OTHER; note = 2'O-methyl ribonucleotide
  modified_base 1..4: mod_base = OTHER; note = phosphorothioate linkage
  modified_base 145..147: mod_base = OTHER; note = 2'O-methyl ribonucleotide
  modified_base 144..147: mod_base = OTHER; note = phosphorothioate linkage
tctgggagagggtagcgcagggtggtttgagagtgagaaatcacgagttcaaaaaacatgatttattcaaaccgtcttcttcggaaggccccacagtgtgtggacagtttgcccggttctcagtgtagcgcctgcgctacccttttt

SEQ ID NO: 1454 - RNA, 150 nt, synthetic construct
  source 1..150: mol_type = other RNA; note chemically_modified_guide_5nt_change_PBS_16_D2_scaffold_AAV S1_71-2_target
  modified_base 1..3: mod_base = OTHER; note = 2'O-methyl ribonucleotide
  modified_base 1..4: mod_base = OTHER; note = phosphorothioate linkage
  modified_base 148..150: mod_base = OTHER; note = 2'O-methyl ribonucleotide
  modified_base 147..150: mod_base = OTHER; note = phosphorothioate linkage
tctgggagagggtagcgcagggtggtttgagagtgagaaatcacgagttcaaaaaacatgatttattcaaaccgtcttcttcggaaggccccacagtgtgtggacagtttgcccggttctcagtgtagcgcctgcgctaccctctctttt

SEQ ID NO: 1455 - RNA, 136 nt, synthetic construct
  source 1..136: mol_type = other RNA; note chemically_modified_guide_5nt_change_PBS_8_D2C2_scaffold_AA VS1_71-2_target
  modified_base 1..3: mod_base = OTHER; note = 2'O-methyl ribonucleotide
  modified_base 1..4: mod_base = OTHER; note = phosphorothioate linkage
  modified_base 134..136: mod_base = OTHER; note = 2'O-methyl ribonucleotide
  modified_base 133..136: mod_base = OTHER; note = phosphorothioate linkage
tctgggagagggtagcgcagggtggtttgagagtgagaaatcacgagttcaaaaaacatgatttattcaaaccgtcttcttcggaaggccccacagtgtgtggtgcccggttctcagtgtagcgcctgcgcttttt

SEQ ID NO: 1456 - RNA, 138 nt, synthetic construct
  source 1..138: mol_type = other RNA; note chemically_modified_guide_5nt_change_PBS_10_D2C2_scaffold_A AVS1_71-2_target
  modified_base 1..3: mod_base = OTHER; note = 2'O-methyl ribonucleotide
  modified_base 1..4: mod_base = OTHER; note = phosphorothioate linkage
  modified_base 136..138: mod_base = OTHER; note = 2'O-methyl ribonucleotide
  modified_base 135..138: mod_base = OTHER; note = phosphorothioate linkage
tctgggagagggtagcgcagggtggtttgagagtgagaaatcacgagttcaaaaaacatgatttattcaaaccgtcttcttcggaaggccccacagtgtgtggtgcccggttctcagtgtagcgcctgcgctactttt

SEQ ID NO: 1457 - RNA, 141 nt, synthetic construct
  source 1..141: mol_type = other RNA; note chemically_modified_guide_5nt_change_PBS_13_D2C2_scaffold_A AVS1_71-2_target
  modified_base 1..3: mod_base = OTHER; note = 2'O-methyl ribonucleotide
  modified_base 1..4: mod_base = OTHER; note = phosphorothioate linkage
  modified_base 139..141: mod_base = OTHER; note = 2'O-methyl ribonucleotide
  modified_base 138..141: mod_base = OTHER; note = phosphorothioate linkage
tctgggagagggtagcgcagggtggtttgagagtgagaaatcacgagttcaaaaaacatgatttattcaaaccgtcttcttcggaaggccccacagtgtgtggtgcccggttctcagtgtagcgcctgcgctacccttttt

SEQ ID NO: 1458 - RNA, 144 nt, synthetic construct
  source 1..144: mol_type = other RNA; note chemically_modified_guide_5nt_change_PBS_16_D2C2_scaffold_A AVS1_71-2_target
  modified_base 1..3: mod_base = OTHER; note = 2'O-methyl ribonucleotide
  modified_base 1..4: mod_base = OTHER; note = phosphorothioate linkage
  modified_base 142..144: mod_base = OTHER; note = 2'O-methyl ribonucleotide
  modified_base 141..144: mod_base = OTHER; note = phosphorothioate linkage
tctgggagagggtagcgcagggtggtttgagagtgagaaatcacgagttcaaaaaacatgatttattcaaaccgtcttcttcggaaggccccacagtgtgtggtgcccggttctcagtgtagcgcctgcgctaccctctctttt

SEQ ID NO: 1459 - RNA, 165 nt, synthetic construct
  source 1..165: mol_type = other RNA; note chemically_modified_guide_5nt_change_PBS_10_mismatches_AAVS 1_71-2_target
  modified_base 1..3: mod_base = OTHER; note = 2'O-methyl ribonucleotide
  modified_base 1..4: mod_base = OTHER; note = phosphorothioate linkage
  modified_base 163..165: mod_base = OTHER; note = 2'O-methyl ribonucleotide
  modified_base 162..165: mod_base = OTHER; note = phosphorothioate linkage
tctgggagagggtagcgcagggtggtttgagagtgagaaatcacgagttcaaaaaacatgatttattcaaaccgtcttcttcggaaggccccacagtgtgtggacagtaaagcttgcttcggcaagctgcccggttctcagtgtagcgcctgcgcttgttttttt

SEQ ID NO: 1460 - RNA, 168 nt, synthetic construct
  source 1..168: mol_type = other RNA; note chemically_modified_guide_5nt_change_PBS_13_mismatches_AAVS 1_71-2_target
  modified_base 1..3: mod_base = OTHER; note = 2'O-methyl ribonucleotide
  modified_base 1..4: mod_base = OTHER; note = phosphorothioate linkage
  modified_base 166..168: mod_base = OTHER; note = 2'O-methyl ribonucleotide
  modified_base 165..168: mod_base = OTHER; note = phosphorothioate linkage
tctgggagagggtagcgcagggtggtttgagagtgagaaatcacgagttcaaaaaacatgatttattcaaaccgtcttcttcggaaggccccacagtgtgtggacagtaaagcttgcttcggcaagctgcccggttctcagtgtagcgcctgcgcttgagcttttttt

SEQ ID NO: 1461 - RNA, 171 nt, synthetic construct
  source 1..171: mol_type = other RNA; note chemically_modified_guide_5nt_change_PBS_16_mismatches_AAVS 1_71-2_target
  modified_base 1..3: mod_base = OTHER; note = 2'O-methyl ribonucleotide
  modified_base 1..4: mod_base = OTHER; note = phosphorothioate linkage
  modified_base 169..171: mod_base = OTHER; note = 2'O-methyl ribonucleotide
  modified_base 168..171: mod_base = OTHER; note = phosphorothioate linkage
tctgggagagggtagcgcagggtggtttgagagtgagaaatcacgagttcaaaaaacatgatttattcaaaccgtcttcttcggaaggccccacagtgtgtggacagtaaagcttgcttcggcaagctgcccggttctcagtgtagcgcctgcgcttgagcaagttttttt

SEQ ID NO: 1462 - RNA, 175 nt, synthetic construct
  source 1..175: mol_type = other RNA; note chemically_modified_guide_5nt_change_PBS_20_mismatches_AAVS 1_71-2_target
  modified_base 1..3: mod_base = OTHER; note = 2'O-methyl ribonucleotide
  modified_base 1..4: mod_base = OTHER; note = phosphorothioate linkage
  modified_base 173..175: mod_base = OTHER; note = 2'O-methyl ribonucleotide
  modified_base 172..175: mod_base = OTHER; note = phosphorothioate linkage
tctgggagagggtagcgcagggtggtttgagagtgagaaatcacgagttcaaaaaacatgatttattcaaaccgtcttcttcggaaggccccacagtgtgtggacagtaaagcttgcttcggcaagctgcccggttctcagtgtagcgcctgcgcttgagcaaggtccttttttt

SEQ ID NO: 1463 - RNA, 138 nt, synthetic construct
  source 1..138: mol_type = other RNA; note AAVS1_PBS_10_MG3-6_chemically_modified_guide_modL1_scaffold
  modified_base 1..3: mod_base = OTHER; note = 2'O-methyl ribonucleotide
  modified_base 1..4: mod_base = OTHER; note = phosphorothioate linkage
  modified_base 136..138: mod_base = OTHER; note = 2'O-methyl ribonucleotide
  modified_base 135..138: mod_base = OTHER; note = phosphorothioate linkage
ggctccatcgtaagcaaaccttgttgcgcgtcgaaagacgcgcgctaaggcatccttccgatgctgacttctcaccgtccgttatccaataggagcgggcggtatggccagaccttctaaggtttgcttacttttttt

SEQ ID NO: 1464 - RNA, 138 nt, synthetic construct
  source 1..138: mol_type = other RNA; note AAVS1_PBS_10_MG3-6_chemically_modified_guide_modL2_scaffold
  modified_base 1..3: mod_base = OTHER; note = 2'O-methyl ribonucleotide
  modified_base 1..4: mod_base = OTHER; note = phosphorothioate linkage
  modified_base 136..138: mod_base = OTHER; note = 2'O-methyl ribonucleotide
  modified_base 135..138: mod_base = OTHER; note = phosphorothioate linkage
ggctccatcgtaagcaaaccttgttgagaatcgaaagattcttaataaggcgcccttccggcgccgacttctcaccgtccgttatccaataggagcgggcggtatggccagaccttctaaggtttgcttacttttttt

SEQ ID NO: 1465 - RNA, 138 nt, synthetic construct
  source 1..138: mol_type = other RNA; note AAVS1_PBS_10_MG3-6_chemically_modified_guide_modL3_scaffold
  modified_base 1..3: mod_base = OTHER; note = 2'O-methyl ribonucleotide
  modified_base 1..4: mod_base = OTHER; note = phosphorothioate linkage
  modified_base 136..138: mod_base = OTHER; note = 2'O-methyl ribonucleotide
  modified_base 135..138: mod_base = OTHER; note = phosphorothioate linkage
ggctccatcgtaagcaaaccttgttgagaatcgaaagattcttaataaggcatccttccgatgctgacttctcgccgcccgcgagccaatcggcgcgggcggcatggccagaccttctaaggtttgcttacttttttt

SEQ ID NO: 1466 - RNA, 138 nt, synthetic construct
  source 1..138: mol_type = other RNA; note AAVS1_PBS_10_MG3-6_chemically_modified_guide_modL4_scaffold
  modified_base 1..3: mod_base = OTHER; note = 2'O-methyl ribonucleotide
  modified_base 1..4: mod_base = OTHER; note = phosphorothioate linkage
  modified_base 136..138: mod_base = OTHER; note = 2'O-methyl ribonucleotide
  modified_base 135..138: mod_base = OTHER; note = phosphorothioate linkage
ggctccatcgtaagcaaaccttgttgcgcgtcgaaagacgcgcgctaaggcgcccttccggcgccgacttctcgccgcccgcgagccaatcggcgcgggcggcatggccagaccttctaaggtttgcttacttttttt

SEQ ID NO: 1467 - RNA, 141 nt, synthetic construct
  source 1..141: mol_type = other RNA; note AAVS1_PBS_13_MG3-6_chemically_modified_guide_modL1_scaffold
  modified_base 1..3: mod_base = OTHER; note = 2'O-methyl ribonucleotide
  modified_base 1..4: mod_base = OTHER; note = phosphorothioate linkage
  modified_base 139..141: mod_base = OTHER; note = 2'O-methyl ribonucleotide
  modified_base 138..141: mod_base = OTHER; note = phosphorothioate linkage
ggctccatcgtaagcaaaccttgttgcgcgtcgaaagacgcgcgctaaggcatccttccgatgctgacttctcaccgtccgttatccaataggagcgggcggtatggccagaccttctaaggtttgcttacgatttttttt

SEQ ID NO: 1468 - RNA, 141 nt, synthetic construct
  source 1..141: mol_type = other RNA; note AAVS1_PBS_13_MG3-6_chemically_modified_guide_modL2_scaffold
  modified_base 1..3: mod_base = OTHER; note = 2'O-methyl ribonucleotide
  modified_base 1..4: mod_base = OTHER; note = phosphorothioate linkage
  modified_base 139..141: mod_base = OTHER; note = 2'O-methyl ribonucleotide
  modified_base 138..141: mod_base = OTHER; note = phosphorothioate linkage
ggctccatcgtaagcaaaccttgttgagaatcgaaagattcttaataaggcgcccttccggcgccgacttctcaccgtccgttatccaataggagcgggcggtatggccagaccttctaaggtttgcttacgatttttttt

SEQ ID NO: 1469 - RNA, 141 nt, synthetic construct
  source 1..141: mol_type = other RNA; note AAVS1_PBS_13_MG3-6_chemically_modified_guide_modL3_scaffold
  modified_base 1..3: mod_base = OTHER; note = 2'O-methyl ribonucleotide
  modified_base 1..4: mod_base = OTHER; note = phosphorothioate linkage
  modified_base 139..141: mod_base = OTHER; note = 2'O-methyl ribonucleotide
  modified_base 138..141: mod_base = OTHER; note = phosphorothioate linkage
ggctccatcgtaagcaaaccttgttgagaatcgaaagattcttaataaggcatccttccgatgctgacttctcgccgcccgcgagccaatcggcgcgggcggcatggccagaccttctaaggtttgcttacgatttttttt

SEQ ID NO: 1470 - RNA, 141 nt, synthetic construct
  source 1..141: mol_type = other RNA; note AAVS1_PBS_13_MG3-6_chemically_modified_guide_modL4_scaffold
  modified_base 1..3: mod_base = OTHER; note = 2'O-methyl ribonucleotide
  modified_base 1..4: mod_base = OTHER; note = phosphorothioate linkage
  modified_base 139..141: mod_base = OTHER; note = 2'O-methyl ribonucleotide
  modified_base 138..141: mod_base = OTHER; note = phosphorothioate linkage
ggctccatcgtaagcaaaccttgttgcgcgtcgaaagacgcgcgctaaggcgcccttccggcgccgacttctcgccgcccgcgagccaatcggcgcgggcggcatggccagaccttctaaggtttgcttacgatttttttt

SEQ ID NO: 1471 - RNA, 138 nt, synthetic construct
  source 1..138: mol_type = other RNA; note chemically_modified_guide_2nt_change_PBS_10_mismatches_AAVS 1_MG3-6_target
  modified_base 1..3: mod_base = OTHER; note = 2'O-methyl ribonucleotide
  modified_base 1..4: mod_base = OTHER; note = phosphorothioate linkage
  modified_base 135..137: mod_base = OTHER; note = 2'O-methyl ribonucleotide
  modified_base 134..137: mod_base = OTHER; note = phosphorothioate linkage
ggctccatcgtaagcaaaccttgttgagaatcgaaagattcttaataaggcatccttccgatgctgacttctcaccgtccgttatccaataggagcgggcggtatggccagaccttctaaggtttgcttgtttttttt

SEQ ID NO: 1472 - RNA, 141 nt, synthetic construct
  source 1..141: mol_type = other RNA; note chemically_modified_guide_2nt_change_PBS_13_mismatches_AAVS 1_MG3-6_target
  modified_base 1..3: mod_base = OTHER; note = 2'O-methyl ribonucleotide
  modified_base 1..4: mod_base = OTHER; note = phosphorothioate linkage
  modified_base 139..141: mod_base = OTHER; note = 2'O-methyl ribonucleotide
  modified_base 138..141: mod_base = OTHER; note = phosphorothioate linkage
ggctccatcgtaagcaaaccttgttgagaatcgaaagattcttaataaggcatccttccgatgctgacttctcaccgtccgttatccaataggagcgggcggtatggccagaccttctaaggtttgcttgtctattttttt

SEQ ID NO: 1473 - RNA, 145 nt, synthetic construct
  source 1..145: mol_type = other RNA; note chemically_modified_guide_2nt_change_PBS_16_mismatches_AAVS 1_MG3-6_target
  modified_base 1..3: mod_base = OTHER; note = 2'O-methyl ribonucleotide
  modified_base 1..4: mod_base = OTHER; note = phosphorothioate linkage
  modified_base 143..145: mod_base = OTHER; note = 2'O-methyl ribonucleotide
  modified_base 142..145: mod_base = OTHER; note = phosphorothioate linkage
ggctccatcgtaagcaaaccttgttgagaatcgaaagattcttaataaggcatccttccgatgctgacttctcaccgtccgttatccaataggagcgggcggtatggccagaccttctaaggtttgcttgtctaactgttttttt

SEQ ID NO: 1474 - RNA, 149 nt, synthetic construct
  source 1..149: mol_type = other RNA; note chemically_modified_guide_2nt_change_PBS_20_mismatches_AAVS 1_MG3-6_target
  modified_base 1..3: mod_base = OTHER; note = 2'O-methyl ribonucleotide
  modified_base 1..4: mod_base = OTHER; note = phosphorothioate linkage
  modified_base 147..149: mod_base = OTHER; note = 2'O-methyl ribonucleotide
  modified_base 146..149: mod_base = OTHER; note = phosphorothioate linkage
ggctccatcgtaagcaaaccttgttgagaatcgaaagattcttaataaggcatccttccgatgctgacttctcaccgtccgttatccaataggagcgggcggtatggccagaccttctaaggtttgcttgtctaactgaagcttttttt

SEQ ID NO: 1475 - RNA, 3399 nt, synthetic construct
  source 1..3399: mol_type = other RNA; note = mRNA_MG3-6_mammalian_codon_optimized
agcaccgacatgaagaactaccggatcggcgtggacgtgggcgatagatctgttggactggccgccatcgagttcgacgatgatggactgcccatccagaagctggccctggtcacctttagacacgatggcggactggaccccaccaagaacaagacccctatgagccggaaagagacacggggaatcgccagacggaccatgcggatgaacagagagcggaagcggcggctgagaaacctggacaacgtgctggaaaacctgggctactctgtgcctgagggccctgagcctgagacatatgaggcctggacaagcagagccctgctggcctctatcaaactggcctctgccgacgagctgaacgaacaccttgtcagagccgtgcggcacatggccagacatagaggatgggccaatccttggtggtccctggaccagctggaaaaggccagccaagagcctagcgagacattcgagatcatcctggccagagccagagagctgttcggcgagaaggtgcccgctaatcctacactgggaatgctgggagccctggccgctaacaatgaggtgctgctgaggcccagggacgagaagaagagaaagaccggatacgtgcggggcacccctctgatgtttgctcaagttcgacagggcgatcagctggccgagctgcggagaatttgtgaagtgcagggcatcgaggaccagtacgaggctctgagactgggcgtgttcgaccacaagcacccctacgtgcccaaagaaagagtgggcaaagaccctctgaaccccagcaccaacagaaccatcagagccagcctggaatttcaagagttccgcatcctggacagcgtggccaatctgagagtgcggatcggcagcagagccaagagggaactgacagaggccgagtatgatgccgccgtggaattcctgatggactacgccgacaaagagcagcctagctgggccgatgtggccgagaaaattggcgtgcccggcaacagactggtggcccctgttctggaagatgtgcagcagaaaacagccccttacgacagaagcagcgccgcctttgagaaggccatgggcaagaaaaccgaggccagacagtggtgggagtccaccgatgatgaccagctgagaagcctgctgattgccttcctggtggacgccaccaacgacacagaagaagccgctgctgaagccggcctgagcgagctgtataagtcttggcctgccgaggaaagagaggccctgtccaacatcgacttcgagaagggcagagtggcctacagccaagaaaccctgagcaagctgagcgagtacatgcacgagtacagagtgggactgcacgaggctagaaaggccgtgttcggagtggatgatacctggcggcctcctctggataagctggaagaacctacaggacagcctgccgtggacagagtgctgaccatcctgagaagattcgtgctggactgcgagcggcaatggggcagacctagagccatcaccgtggaacacacacggacaggcctgatgggcccaacacagagacagaagatcctgaacgagcagaagaagaaccgggccgacaacgagagaatccgggatgagctgagagaatctggcgtggacaacccctccagagccgaagttcggagacacctgatcgtgcaagagcaagagtgccagtgcctgtactgcggcaccatgatcaccaccaccacaagcgagctggaccacatcgttcctagagccggtggcggcagcagcagaagggaaaatctggccgctgtgtgcagagcctgcaacgccaagaagaaacgcgagctgttctacgcctgggctggcccagtgaagtcccaagagacaatcgagagagtcagacagctgaaggcctttaaggacagcaagaaagccaagatgttcaagaaccagatccgccggctgaaccagaccgaggccgatgagcctatcgacgaaagaagcctggccagcacatcttacgccgctgtggccgttagagagcggctggaacagcacttcaacgaaggcctggcactggacgacaagtccagagtggtgctggatgtgtatgccggcgctgtgaccagagagtctcgtagagctggcggcatcgacgagcggattctgctgagaggcgagcgggacaagaacagattcgatgtgcggcatcacgccgtggacgctgctgttatgaccctgctgaacagatccgtggctctgaccctggaacagagatcacagctgcggcggaccttctacgagcaaggactggacaaactggaccggaaccagctgaagcccgaggaagattggagagacttcaccggactggcccctgcctctcaagagaagtttctggaatggcggaaggccgccaccatcctgggagatttgctggccgaagccatcgaggatgactctatcgccgtggtgtccccactgagactgaggccacagaatggcagcgtgcacctggaaacaatcagcgccgtgaagaagcagaccctgggctctgattggccagccgacgccgtgaaaagaatcgtggaccccgagatctacctggctatgaaggatgccctgggaaagctgaaagagctgcccgaggatagcgccagatctctggaactgcccgacggcagattcgtggaagccgatgacgaggtgctgttcttcccagagaacgccgccagcattctgacccctagaggcgtggcagagatcggcggctctattcaccatgccagactgtacggctggctgaccaaaaagggcgagctgaaagtgggcatgctgagagtgtacggcgccgagtttccctggctgatgagagagtccggctccagaaacgtgctgagcatgcctatccacagaggcagccagagcttccgggacatgcaggacacaacccggaaagccgtggaaagcggagaggctgtggaattcgcctggatcacccagaacgatgagctggaattcgaccccgacgactacattgcccacggcggaaaggacgaactgagacagttcctgggctttatgcccgagtgccgttggagagtggacggcttcaagaagaattaccagatcagaatcaggcccgccatgctgagcagagagcagctgcctagcgacatccagcggagactggaaagcaagaccctgaccaagaacgagtccctgctgctgaaagccctggatacaggactggtggtggccatcggaggactgctgcctctcgagacactgaaagtgatccggcgcaacaatctgggcttccccaggtggcgcggaaacggaaatctgcccaccagctttgaagtgcggagcagcgctctgagagccctgggagttgaagga

SEQ ID NO: 1476 - RNA, 4370 nt, synthetic construct
  source 1..4370: mol_type = other RNA; note = mRNA_MG3-6/3-8_mammalian_codon_optimized
agaagaagcggaaagttggcggcggaggcagccaaaacaagaagaacgttgattactatgtaggactcgatatgggagacgcaagcgtgggctgggctgtgaccgatctcaattataacatcttaaaattcaacgggaaggcactgtggggcatcaggctgttcgattcagcagaaacagctgcagccaggcggggcttccggagcgccaggagacgtattgatcgggtgtcctggagaatatccatgctccaggaattattcgcagacgagatcgccaaggttgatgcagggttctttcaaaggctcaaagactcacggctgcaggtcgaggacaaacaagagaaaaccgcctacaacttgtttgttgggcaaaattacaccgataaagatttctaccagcaatacccgactatgtaccatcttaggtatgctctcgctacacaagccgggccattcgatgtcagactgctctacttggctgtgcagcatatagtaaagcatagagggcacttcttattcgaaaatctggacgcttccaaggtgggtgactttgtggcagtcttcggagaggtagaaagctacgtgcacgacgaaatggaattagatgagtggtactgtcacgatatagacgccttggccaaggttctgtgtaatgccaacttaggcataaccgcaaaacagaaagctatacaaaatctgctccctgctaagacaaagcaggagaaagctatcgtccaactgctgtctggcggaaaggccaaactgtgtgacttgttctgtgatgaagagctggctgagtgtgagaagaagagtatctcatttcaagaagataacctcgatgagctcgagcctattcttgaggcgatccttcaagagagatatgaagcactcttgagatttaaagccgtctatgattggagcttgttggcaaagatactgagactggacgcggataagaaatctgaaaacgaaatgcacctgctgtcagaatgcaaagtgaaggtttacgaagaacataagaaggatcttgcagtgttaaagagtatgctgaaaggaaaaccactgtataataaattgtttcggcaggatggcgaggatacatacgcaaattatgcacaaggcatcaaggggattaaccaagttgacttttgtaagagccttaagaaacagcttgagtcaattggcgaatacaagaaacaaatgcaacaactgacgtcatttgaggacgcccagacagacgttgaacgtctcctctttagagtggcaaatggattagcatttcctaagcaaacaaccaaggataacggaattatccctatccaagttcaccttgctgagctgcagtgcatacttgcccacgcagagaagtatctcccattcttgaagaatgccgacgccaacggcctgtccgtacgagagaaaatcacacaaatcgtcaaatttaggataccctattacgttgggcccctggctggtacccgcctgtccagagagcaaggcagatgctgggtagagaggcgagccgaactcaagaatgaaaagatttacccatggaactttgataaggtggtggatttggaagcgtcagccgaaaatttcatcactaacatgaccgccaagtgtacataccttgttggagaagacgtgttgccaaaagaaagcctcttatacagtgaattcatggtgcggaacgcacttaacaacctgacaattgacggggaaaggctcccagtgagcctgttgcaaaagatctataagcaactgtttctggagaaaactttcaaagttacaaagaaagctctcgagagattctttaagcaagagaatgtcagctaccacgatattggcggaatcgacgacaagattaatgcttcaatgaaggcttataacgattttaaaagaattttcggtgaggcctatattgaaatgcatcgggacgagatcgaaaacattatccggtggattactctcttctgtgatgagaagaaaatgctcgaaactaagattcggaagacatatccccaaataccggacgacaaaatcaaagcaatcaagaagctgaagtacaaggattggggacgacttagtgcaacactcctggattcaggcaagatcgcctacgaagacgcttccgtgggcgaacggattacaattataagcgccctcagacataccaacaagaacttcatggagttattgtcttcaaattgtcagtacgactttatcggaaagatcaaagacttcaacggtagcaaacaatcagataatggtaagttgacctacaaagatgtagaagagctgtacgtgtctccgtcagttaaaaggagtatctggcaaacgctgacaatactggaagagattaagaaaataatgggctgcgaacctaaacggattttcattgaaatggccagaagcaaggaagagagcctcaggactaacagtcgtctgcaacgactccaagacttatataagaagtgcaaagaggaaaatattgacttcatgcctaaagcagatgaactcacagatatccgctcacaattgcagtgcaagaacgaagaggatctgaggagcgataagctgtatctctattacacccaaatgggccgatgtatgtacaccggtgagaggattgagttagccagcctgtatgaccaaaataagtatgatgtcgacgctatatatcctaggagtaagacgaaggatgatagcctcaacaatcgagtattggtaaagaaagaaatcaacagcgccaagacagataactacccgattgacgctgatattaggaagaaaatgcatgctttctggaaaatgttgtatgataagggattcattgaccaaaagaaatatgagcgcctcactaggtccactcagctcaccgacgaggaattagccgggttcataaaccggcaactcgtggaaacacgccagtcaaccaaagctacagcagatattctcaaatctgcatacgaacattccgaagtggtctatgtaaaagcaggcaatgtgtctgatttccgccaacagtttgactttgttaaatgccgggaagtgaatgacttgcaccatgccaaagatgcttacctgaacatcgtggtcggtaattgctatcacgtcaaatttactattaatccattgatgttcattagagggaaccaggacaacagacgctattccctcaaacccgaagttttctacgcccacgacatcaaacgtaatggcgaaatcgcttggctggcgggagacaatggaacgatggcgacggtaaagagggttatgcagaagaacaacgtcctgttcacaaggctcgctgtcgaagggaagggtgaacttttcaaacagaatcccttgaaggctaaatcaggacaactgccgttgaaggctggactgtctatcgataaatacggcggctatgactccctctccactgcctattttgcattggtggagtcagaaggtaagaagggtgccgtgcaatttaccattgaggcaattcctctcgtctatgccaagcaaggtgaagccactataaagaaatatctgaccgaggtagtccaactgtgtaaacccgagattaaagtaatgaggataaagaaatatagcttgctcaaaatcaacggatttccgatgcacatctcaggaagaacaggcaagcagttgatattctatgtcgcttcccaattgtgtatcgacgagaattccgtagcgtacctgaagaaagcgttaaaatatgagtctaaccttgaggagaacgaggctatcctggctgacaagaatgccgatgagtctatgaagcagaaagcatttaaccgacttatgttctataaggatacatggggcattagtgcagaggcaaatttgcaactgtatgacatgcttctggctaaatccgctaacaacttatacaagaataggcccgcgtctcagactgcgactttaaaagagaaaagggaacaatttgcaaaattgagcctgtccaagcaaatccacgtcataaaggagatattgaacctctttaaatgcgctagcgccagcgcagattttaaactcctggataagggagccgcgtgtggaatactcaaagtgtccaataacataacaaaacttaagcagtgcgttcttattaatcaatctccaacaggcgtattcgaacaagaggtggatctcatgcggctctctggcggaaaaagacctgccgccacaaagaaagccggacaggccaagaaaaagaagtgagctcgctttcttgctgtccaatttctattaaaggttcctttgttccctaagtccaactactaaactgggggatattatgaagggccttgagcatctggattctgcctaataaaaaacatttattttcattgc

SEQ ID NO: 1477 - RNA, 3078 nt, synthetic construct
  source 1..3078: mol_type = other RNA; note = mRNA_MG14-241_mammalian_codon_optimized
atggaagccaacagaccctacctggtgctgggcctcgatcctggaattgccagctgcggcttctgcctgctggacatgaccgaccacaagattctggaaatgggcagccacctgttcgacgcccctcaagaggccaagaccaagacatctctggccgtgaccagacggaacgccagatccgccagaagaaacaccctgagaaccgccaccagaatgaagcactgtctggccctgctgaagggcgctgatctggtgcctgaagatgccgataaggcctggctgcagagcaagaagggcgacaagcctatcctgaagctgagagccaacggcctggacagaaagctggccgacagagaatttgcccaggtgctgtactccctgtgcggcagaagaggctatatccctcacggcgaaggcagactgggcgagacagatgatggcgagggaagaaaggtgctgagcgccatcaaggccaacgaggccacaatgaagcggggcaactacagaaccgtgggcgagatgctgtacgccaacgacggcaagagcagaaacagaggcggcgactacagcctgtgcgtgtacaacagccagatcaaggacgaagtgcgggccctgtttgctgctcagagagccctgggaaatagcaaggcctccgagggcttcgagaaggactacatcgactgcctggaatgggagaagaaaaccgtggaccacgacaagcgggtgtacgaactcgtgggcgcctgtccttacttccccgaggaaaagagagccgccgacgccgatatcagcagcgaactgtgtagagcctacgagcggctgggccacattgccattgtgcacgaggatggcagcgagcagaatctgacccctaaccagatcgacggctacctggacgtgctgttctctccactgcctctgaagggcaacaaagaatgcaaagtgacctacggcaccatccggaaggacctggatctgagcggcaaggacgtgttcaaaggcgtggcacaggatggcgagaaaggcgagcctttcagccccaagtcttggcggtgtctgagaacagccctgtacgagaaccacgaggatctgctcgtgcggatgctgaaggatagagagctgggcgacgatatctgcgaggccctgacatttgccagcacagaagccagcctgggagagagactgggactgctggatctcaccgacgatgaacaggccgctctgtgtagcagcgtgccctttaccggcaagctgtttaaaggctacggcaatcggagcctgaaggccctgggtattctgctgggagccttcgaggaacccgagatcagaaccctgaccgatgccgagagagccacaggcctgcttgatctgagactggctgacagaggcctgcgggacaatctgctgcccagctacagcaaatacgaccccacctgtagaaaccccgtggtgctgagatccatgggcagaatgcggagaatcgtgaatgccatcatcagaatccacggcgtgcccgacgagatccacatcgagctgggaagagatctgaagatgtctaacaaagagaaggccaccgtcagcaagaaccagcgggccaatgaagccgccaacaagaagtgggccgccaaggccgctaatatcctgggctgtagccctgaggaagtgcccggaagaattgtgcggaagctggccatgagagaggaacagggcgataaggacgcctacacaggcgccgctatcgacctggaacacctcgtgcgggacgacagatactgcgagatcgaccacatcctgccttacagcagaacctgcgacgacagcagagccaacaaggtgctggtgctgtccaagagcaaccaggacaagagagagcggaccccttacgagtggatgacatctggcgaacccggcgctcctgactgggatgagtaccggaatagagtgatggccaccgtgaagtacgccagaaagagggccaacctgctgaacaccgatctgggccctaatgtgcaggcccagttcctggccagaaacctgaacgacgaccggtacatgagcgtggccgtgaagaactacctggaagattgcctgctgttccccaacgatggccggaaaaagcacgtgacagctgtggctggcggagccaccggaaatctgagatgggtttggggcctgaacttcggccagggcaacaccaaggacagggacgacgatagacaccatgccgtggacgccgccattatcgccgcctgttctgagagcacagtgaagaaggtggccgaggccagcagcaagggcagagagacattcaagcacctgagaaagagccggctgagcgacacacagccttggcctacatttgccgaggaagtggccgctagaagggccttcgtggtgcctaccagaatggtcaatcacggcgtgaccggcagagtgttcgaggacacactgtaccacctggaaggcttcaccaacgacaagggcaagtaccctctcgtcagagccggcgagaaaaccgccaaaaagggcaatgtgcggatcggccctgatggctccgtgaagctgattgacggcatggcctttctgcggctgtggctcgaccctaacgccagacctaacggcaaagtgaaaggcaagtggtacgccgagcctgtgtactacgctgacatccccgccattaaggccggcacctatgtgcctagagcctgcacaattcacgtggcccggaatgcctgggaacctgtgcctgaatctgccatgcagagggaaccagtggtgctgtttgccggcgacgtggtggaagtggatggccacatcggcagatacagcggcttcaacatcttcggcggcagaatcaccatcctgaacctgctcaccaaggccgaagtcggcgattggccatctctcggctcttggggcagagatacacaagtgcgggtgctgcaagaggattgcctgggccactgctacgacgacatcgtgatcaaccccgacaacagcaccttcagacagagagagtctggcggaaaaagacctgccgccacaaagaaagccggacaggccaagaaaaagaagtga

SEQ ID NO: 1478 - RNA, 3144 nt, synthetic construct
  source 1..3144: mol_type = other RNA; note = MG14-241(H596A)
atgaagaggaccgctgatggttccgaatttgaatctcctaagaagaaacgaaaggttatggaagccaacagaccctacctggtgctgggcctcgatcctggaattgccagctgcggcttctgcctgctggacatgaccgaccacaagattctggaaatgggcagccacctgttcgacgcccctcaagaggccaagaccaagacatctctggccgtgaccagacggaacgccagatccgccagaagaaacaccctgagaaccgccaccagaatgaagcactgtctggccctgctgaagggcgctgatctggtgcctgaagatgccgataaggcctggctgcagagcaagaagggcgacaagcctatcctgaagctgagagccaacggcctggacagaaagctggccgacagagaatttgcccaggtgctgtactccctgtgcggcagaagaggctatatccctcacggcgaaggcagactgggcgagacagatgatggcgagggaagaaaggtgctgagcgccatcaaggccaacgaggccacaatgaagcggggcaactacagaaccgtgggcgagatgctgtacgccaacgacggcaagagcagaaacagaggcggcgactacagcctgtgcgtgtacaacagccagatcaaggacgaagtgcgggccctgtttgctgctcagagagccctgggaaatagcaaggcctccgagggcttcgagaaggactacatcgactgcctggaatgggagaagaaaaccgtggaccacgacaagcgggtgtacgaactcgtgggcgcctgtccttacttccccgaggaaaagagagccgccgacgccgatatcagcagcgaactgtgtagagcctacgagcggctgggccacattgccattgtgcacgaggatggcagcgagcagaatctgacccctaaccagatcgacggctacctggacgtgctgttctctccactgcctctgaagggcaacaaagaatgcaaagtgacctacggcaccatccggaaggacctggatctgagcggcaaggacgtgttcaaaggcgtggcacaggatggcgagaaaggcgagcctttcagccccaagtcttggcggtgtctgagaacagccctgtacgagaaccacgaggatctgctcgtgcggatgctgaaggatagagagctgggcgacgatatctgcgaggccctgacatttgccagcacagaagccagcctgggagagagactgggactgctggatctcaccgacgatgaacaggccgctctgtgtagcagcgtgccctttaccggcaagctgtttaaaggctacggcaatcggagcctgaaggccctgggtattctgctgggagccttcgaggaacccgagatcagaaccctgaccgatgccgagagagccacaggcctgcttgatctgagactggctgacagaggcctgcgggacaatctgctgcccagctacagcaaatacgaccccacctgtagaaaccccgtggtgctgagatccatgggcagaatgcggagaatcgtgaatgccatcatcagaatccacggcgtgcccgacgagatccacatcgagctgggaagagatctgaagatgtctaacaaagagaaggccaccgtcagcaagaaccagcgggccaatgaagccgccaacaagaagtgggccgccaaggccgctaatatcctgggctgtagccctgaggaagtgcccggaagaattgtgcggaagctggccatgagagaggaacagggcgataaggacgcctacacaggcgccgctatcgacctggaacacctcgtgcgggacgacagatactgcgagatcgacgccatcctgccttacagcagaacctgcgacgacagcagagccaacaaggtgctggtgctgtccaagagcaaccaggacaagagagagcggaccccttacgagtggatgacatctggcgaacccggcgctcctgactgggatgagtaccggaatagagtgatggccaccgtgaagtacgccagaaagagggccaacctgctgaacaccgatctgggccctaatgtgcaggcccagttcctggccagaaacctgaacgacgaccggtacatgagcgtggccgtgaagaactacctggaagattgcctgctgttccccaacgatggccggaaaaagcacgtgacagctgtggctggcggagccaccggaaatctgagatgggtttggggcctgaacttcggccagggcaacaccaaggacagggacgacgatagacaccatgccgtggacgccgccattatcgccgcctgttctgagagcacagtgaagaaggtggccgaggccagcagcaagggcagagagacattcaagcacctgagaaagagccggctgagcgacacacagccttggcctacatttgccgaggaagtggccgctagaagggccttcgtggtgcctaccagaatggtcaatcacggcgtgaccggcagagtgttcgaggacacactgtaccacctggaaggcttcaccaacgacaagggcaagtaccctctcgtcagagccggcgagaaaaccgccaaaaagggcaatgtgcggatcggccctgatggctccgtgaagctgattgacggcatggcctttctgcggctgtggctcgaccctaacgccagacctaacggcaaagtgaaaggcaagtggtacgccgagcctgtgtactacgctgacatccccgccattaaggccggcacctatgtgcctagagcctgcacaattcacgtggcccggaatgcctgggaacctgtgcctgaatctgccatgcagagggaaccagtggtgctgtttgccggcgacgtggtggaagtggatggccacatcggcagatacagcggcttcaacatcttcggcggcagaatcaccatcctgaacctgctcaccaaggccgaagtcggcgattggccatctctcggctcttggggcagagatacacaagtgcgggtgctgcaagaggattgcctgggccactgctacgacgacatcgtgatcaaccccgacaacagcaccttcagacagagagagtctggcggcagctctggcggaaaaagacctgccgccacaaagaaagccggacaggccaagaaaaagaag

SEQ ID NO: 1479 - RNA, 123 nt, synthetic construct
  source 1..123: mol_type = other RNA; note AAVS1_G1_MG14-241_chemically_modified_guide_5nt_change
  modified_base 1..3: mod_base = OTHER; note = 2'O-methyl ribonucleotide
  modified_base 1..4: mod_base = OTHER; note = phosphorothioate linkage
  modified_base 121..123: mod_base = OTHER; note = 2'O-methyl ribonucleotide
  modified_base 120..123: mod_base = OTHER; note = phosphorothioate linkage
gtaaggaagctgcagcaccaggatgtcttgccggaaacggctagacaagggaatcgcttttacgcgattacccgcaaggtaagcccgtcagcacccttggtgtcggcgggcgatccttttttt

SEQ ID NO: 1480 - RNA, 123 nt, synthetic construct
  source 1..123: mol_type = other RNA; note AAVS1_H1_MG14-241_chemically_modified_guide_5nt_change
  modified_base 1..3: mod_base = OTHER; note = 2'O-methyl ribonucleotide
  modified_base 1..4: mod_base = OTHER; note = phosphorothioate linkage
  modified_base 121..123: mod_base = OTHER; note = 2'O-methyl ribonucleotide
  modified_base 120..123: mod_base = OTHER; note = phosphorothioate linkage
gttctggcaaggagagagatggctgtcttgccggaaacggctagacaagggaatcgcttttacgcgattacccgcaaggtaagcccgtcagcacccttggtgtcggcgggcgatccttttttt

SEQ ID NO: 1481 - RNA, 123 nt, synthetic construct
  source 1..123: mol_type = other RNA; note AAVS1_B2_MG14-241_chemically_modified_guide_5nt_change
  modified_base 1..3: mod_base = OTHER; note = 2'O-methyl ribonucleotide
  modified_base 1..4: mod_base = OTHER; note = phosphorothioate linkage
  modified_base 121..123: mod_base = OTHER; note = 2'O-methyl ribonucleotide
  modified_base 120..123: mod_base = OTHER; note = phosphorothioate linkage
ccacaggagaacggggtgtccagggtcttgccggaaacggctagacaagggaatcgcttttacgcgattacccgcaaggtaagcccgtcagcacccttggtgtcggcgggcgatccttttttt

SEQ ID NO: 1482 - RNA, 123 nt, synthetic construct
  source 1..123: mol_type = other RNA; note AAVS1_E2_MG14-241_chemically_modified_guide_5nt_change
  modified_base 1..3: mod_base = OTHER; note = 2'O-methyl ribonucleotide
  modified_base 1..4: mod_base = OTHER; note = phosphorothioate linkage
  modified_base 121..123: mod_base = OTHER; note = 2'O-methyl ribonucleotide
  modified_base 120..123: mod_base = OTHER; note = phosphorothioate linkage
gagatggcacaggccccagaaggagtcttgccggaaacggctagacaagggaatcgcttttacgcgattacccgcaaggtaagcccgtcagcacccttggtgtcggcgggcgatccttttttt

SEQ ID NO: 1483 - RNA, 123 nt, synthetic construct
  source 1..123: mol_type = other RNA; note AAVS1_F2_MG14-241_chemically_modified_guide_5nt_change
  modified_base 1..3: mod_base = OTHER; note = 2'O-methyl ribonucleotide
  modified_base 1..4: mod_base = OTHER; note = phosphorothioate linkage
  modified_base 121..123: mod_base = OTHER; note = 2'O-methyl ribonucleotide
  modified_base 120..123: mod_base = OTHER; note = phosphorothioate linkage
ggggccactagggacaggattggtgtcttgccggaaacggctagacaagggaatcgcttttacgcgattacccgcaaggtaagcccgtcagcacccttggtgtcggcgggcgatccttttttt

SEQ ID NO: 1484 - RNA, 123 nt, synthetic construct
  source 1..123: mol_type = other RNA; note AAVS1_G2_MG14-241_chemically_modified_guide_5nt_change
  modified_base 1..3: mod_base = OTHER; note = 2'O-methyl ribonucleotide
  modified_base 1..4: mod_base = OTHER; note = phosphorothioate linkage
  modified_base 121..123: mod_base = OTHER; note = 2'O-methyl ribonucleotide
  modified_base 120..123: mod_base = OTHER; note = phosphorothioate linkage
tacacttcccaagaggagaagcaggtcttgccggaaacggctagacaagggaatcgcttttacgcgattacccgcaaggtaagcccgtcagcacccttggtgtcggcgggcgatccttttttt

SEQ ID NO: 1485 - RNA, 146 nt, synthetic construct
  source 1..146: mol_type = other RNA; note AAVS1_E2_MG14-241_chemically_modified_guide_5nt_change_PBS2
  modified_base 1..3: mod_base = OTHER; note = 2'O-methyl ribonucleotide
  modified_base 1..4: mod_base = OTHER; note = phosphorothioate linkage
  modified_base 144..146: mod_base = OTHER; note = 2'O-methyl ribonucleotide
  modified_base 143..146: mod_base = OTHER; note = phosphorothioate linkage
gagatggcacaggccccagaaggagtcttgccggaaacggctagacaagggaatcgcttttacgcgattacccgcaaggtaagcccgtcagcacccttggtgtcggcgggcgatcctgggttcccttttcctggcagttttttttt

SEQ ID NO: 1486 - RNA, 148 nt, synthetic construct
  source 1..148: mol_type = other RNA; note AAVS1_E2_MG14-241_chemically_modified_guide_5nt_change_PBS4
  modified_base 1..3: mod_base = OTHER; note = 2'O-methyl ribonucleotide
  modified_base 1..4: mod_base = OTHER; note = phosphorothioate linkage
  modified_base 146..148: mod_base = OTHER; note = 2'O-methyl ribonucleotide
  modified_base 145..148: mod_base = OTHER; note = phosphorothioate linkage
gagatggcacaggccccagaaggagtcttgccggaaacggctagacaagggaatcgcttttacgcgattacccgcaaggtaagcccgtcagcacccttggtgtcggcgggcgatcctgggttcccttttcctggcagttctttttttt

SEQ ID NO: 1487 - RNA, 150 nt, synthetic construct
  source 1..150: mol_type = other RNA; note AAVS1_E2_MG14-241_chemically_modified_guide_5nt_change_PBS6
  modified_base 1..3: mod_base = OTHER; note = 2'O-methyl ribonucleotide
  modified_base 1..4: mod_base = OTHER; note = phosphorothioate linkage
  modified_base 148..150: mod_base = OTHER; note = 2'O-methyl ribonucleotide
  modified_base 147..150: mod_base = OTHER; note = phosphorothioate linkage
gagatggcacaggccccagaaggagtcttgccggaaacggctagacaagggaatcgcttttacgcgattacccgcaaggtaagcccgtcagcacccttggtgtcggcgggcgatcctgggttcccttttcctggcagttctggttttttt

SEQ ID NO: 1488 - RNA, 152 nt, synthetic construct
  source 1..152: mol_type = other RNA; note AAVS1_E2_MG14-241_chemically_modified_guide_5nt_change_PBS8
  modified_base 1..3: mod_base = OTHER; note = 2'O-methyl ribonucleotide
  modified_base 1..4: mod_base = OTHER; note = phosphorothioate linkage
  modified_base 150..152: mod_base = OTHER; note = 2'O-methyl ribonucleotide
  modified_base 149..152: mod_base = OTHER; note = phosphorothioate linkage
gagatggcacaggccccagaaggagtcttgccggaaacggctagacaagggaatcgcttttacgcgattacccgcaaggtaagcccgtcagcacccttggtgtcggcgggcgatcctgggttcccttttcctggcagttctggggttttttt

SEQ ID NO: 1489 - RNA, 154 nt, synthetic construct
  source 1..154: mol_type = other RNA; note AAVS1_E2_MG14-241_chemically_modified_guide_5nt_change_PBS1 0
  modified_base 1..3: mod_base = OTHER; note = 2'O-methyl ribonucleotide
  modified_base 1..4: mod_base = OTHER; note = phosphorothioate linkage
  modified_base 152..154: mod_base = OTHER; note = 2'O-methyl ribonucleotide
  modified_base 151..154: mod_base = OTHER; note = phosphorothioate linkage
gagatggcacaggccccagaaggagtcttgccggaaacggctagacaagggaatcgcttttacgcgattacccgcaaggtaagcccgtcagcacccttggtgtcggcgggcgatcctgggttcccttttcctggcagttctggggccttttttt

SEQ ID NO: 1490 - RNA, 157 nt, synthetic construct
  source 1..157: mol_type = other RNA; note AAVS1_E2_MG14-241_chemically_modified_guide_5nt_change_PBS1 3
  modified_base 1..3: mod_base = OTHER; note = 2'O-methyl ribonucleotide
  modified_base 1..4: mod_base = OTHER; note = phosphorothioate linkage
  modified_base 155..157: mod_base = OTHER; note = 2'O-methyl ribonucleotide
  modified_base 154..157: mod_base = OTHER; note = phosphorothioate linkage
gagatggcacaggccccagaaggagtcttgccggaaacggctagacaagggaatcgcttttacgcgattacccgcaaggtaagcccgtcagcacccttggtgtcggcgggcgatcctgggttcccttttcctggcagttctggggcctgtttttttt

SEQ ID NO: 1491 - RNA, 160 nt, synthetic construct
  source 1..160: mol_type = other RNA; note AAVS1_E2_MG14-241_chemically_modified_guide_5nt_change_PBS1 6
  modified_base 1..3: mod_base = OTHER; note = 2'O-methyl ribonucleotide
  modified_base 1..4: mod_base = OTHER; note = phosphorothioate linkage
  modified_base 158..160: mod_base = OTHER; note = 2'O-methyl ribonucleotide
  modified_base 157..160: mod_base = OTHER; note = phosphorothioate linkage
gagatggcacaggccccagaaggagtcttgccggaaacggctagacaagggaatcgcttttacgcgattacccgcaaggtaagcccgtcagcacccttggtgtcggcgggcgatcctgggttcccttttcctggcagttctggggcctgtgccttttttt

SEQ ID NO: 1492 - RNA, 164 nt, synthetic construct
  source 1..164: mol_type = other RNA; note AAVS1_E2_MG14-241_chemically_modified_guide_5nt_change_PBS2 0
  modified_base 1..3: mod_base = OTHER; note = 2'O-methyl ribonucleotide
  modified_base 1..4: mod_base = OTHER; note = phosphorothioate linkage
  modified_base 162..164: mod_base = OTHER; note = 2'O-methyl ribonucleotide
  modified_base 161..164: mod_base = OTHER; note = phosphorothioate linkage
gagatggcacaggccccagaaggagtcttgccggaaacggctagacaagggaatcgcttttacgcgattacccgcaaggtaagcccgtcagcacccttggtgtcggcgggcgatcctgggttcccttttcctggcagttctggggcctgtgccatctttttttt

SEQ ID NO: 1493 - DNA, 40 bp, synthetic construct
  source 1..40: mol_type = other DNA; note = 14-241_G1_forward_primer
gctcttccgatctnnnnntagaaaggtgaagagccaaagt

SEQ ID NO: 1494 - DNA, 38 bp, synthetic construct
  source 1..38: mol_type = other DNA; note = 14-241_G1_reverse_primer
gctcttccgatctnnnnnagaggatcctgggagggaga

SEQ ID NO: 1495 - DNA, 38 bp, synthetic construct
  source 1..38: mol_type = other DNA; note = 14-241_H1_forward_primer
gctcttccgatctnnnnnactgagaaccgggcaggtca

SEQ ID NO: 1496 - DNA, 40 bp, synthetic construct
  source 1..40: mol_type = other DNA; note = 14-241_H1_reverse_primer
gctcttccgatctnnnnnacaggattggtgacagaaaagc

SEQ ID NO: 1497 - DNA, 38 bp, synthetic construct
  source 1..38: mol_type = other DNA; note = 14-241_B2_forward_primer
gctcttccgatctnnnnnagaagactagctgagctctc

SEQ ID NO: 1498 - DNA, 38 bp, synthetic construct
  source 1..38: mol_type = other DNA; note = 14-241_B2_reverse_primer
gctcttccgatctnnnnncttcttgtaggcctgcatca

SEQ ID NO: 1499 - DNA, 38 bp, synthetic construct
  source 1..38: mol_type = other DNA; note = 14-241_E2_forward_primer
gctcttccgatctnnnnnaaaacggtgatgatgcaggc

SEQ ID NO: 1500 - DNA, 38 bp, synthetic construct
  source 1..38: mol_type = other DNA; note = 14-241_E2_reverse_primer
gctcttccgatctnnnnntctttccggagcacttcctt

SEQ ID NO: 1501 - DNA, 38 bp, synthetic construct
  source 1..38: mol_type = other DNA; note = 14-241_F2_forward_primer
gctcttccgatctnnnnntagaggttctggcaaggaga

SEQ ID NO: 1502 - DNA, 38 bp, synthetic construct
  source 1..38: mol_type = other DNA; note = 14-241_F2_reverse_primer
gctcttccgatctnnnnngagctgggaccaccttatat

SEQ ID NO: 1503 - DNA, 38 bp, synthetic construct
  source 1..38: mol_type = other DNA; note = 14-241_G2_forward_primer
gctcttccgatctnnnnngctggctactggccttatct

SEQ ID NO: 1504 - DNA, 38 bp, synthetic construct
  source 1..38: mol_type = other DNA; note = 14-241_G2_reverse_primer
gctcttccgatctnnnnntaccctctcccagaacctga

SEQ ID NO: 1505 - DNA, 251 bp, synthetic construct
  source 1..251: mol_type = other DNA; note = 14-241_G1_target_amplified_ngs
tagaaaggtgaagagccaaagttagaactcaggaccaacttattctgattttgtttttccaaactgcttctcctcttgggaagtgtaaggaagctgcagcaccaggatcagtgaaacgcaccagacggccgcgtcagagcagctcaggttctgggagagggtagcgcagggtggccactgagaaccgggcaggtcacgcatcccccccttccctcccaccccctgccaagctctccctcccaggatcctct

SEQ ID NO: 1506 - DNA, 251 bp, synthetic construct
  source 1..251: mol_type = other DNA; note = 14-241_H1_target_amplified_ngs
actgagaaccgggcaggtcacgcatcccccccttccctcccaccccctgccaagctctccctcccaggatcctctctggctccatcgtaagcaaaccttagaggttctggcaaggagagagatggctccaggaaatgggggtgtgtcaccagataaggaatctgcctaacaggaggtgggggttagacccaatatcaggagactaggaaggaggaggcctaaggatggggcttttctgtcaccaatcctgt

SEQ ID NO: 1507 - DNA, 250 bp, synthetic construct
  source 1..250: mol_type = other DNA; note = 14-241_B2_target_amplified_ngs
agaagactagctgagctctcggacccctggaagatgccatgacagggggctggaagagctagcacagactagagaggtaaggggggtaggggagctgcccaaatgaaaggagtgagaggtgacccgaatccacaggagaacggggtgtccaggcaaagaaagcaagaggatggagaggtggctaaagccagggagacggggtactttggggttgtccagaaaaacggtgatgatgcaggcctacaagaag

SEQ ID NO: 1508 - DNA, 251 bp, synthetic construct
  source 1..251: mol_type = other DNA; note = 14-241_E2_target_amplified_ngs
aaaacggtgatgatgcaggcctacaagaaggggaggcgggacgcaagggagacatccgtcggagaaggccatcctaagaaacgagagatggcacaggccccagaaggagaaggaaaagggaacccagcgagtgaagacggcatggggttgggtgagggaggagagatgcccggagaggacccagacacggggaggatccgctcagaggacatcacgtggtgcagcgccgagaaggaagtgctccggaaaga

SEQ ID NO: 1509 - DNA, 250 bp, synthetic construct
  source 1..250: mol_type = other DNA; note = 14-241_F2_target_amplified_ngs
tagaggttctggcaaggagagagatggctccaggaaatgggggtgtgtcaccagataaggaatctgcctaacaggaggtgggggttagacccaatatcaggagactaggaaggaggaggcctaaggatggggcttttctgtcaccaatcctgtccctagtggccccactgtggggtggaggggacagataaaagtacccagaaccagagccacattaaccggccctgggaatataaggtggtcccagctc

SEQ ID NO: 1510 - DNA, 227 bp, synthetic construct
  source 1..227: mol_type = other DNA; note = 14-241_G2_target_amplified_ngs
gctggctactggccttatctcacaggtaaaactgacgcacggaggaacaatataaattggggactagaaaggtgaagagccaaagttagaactcaggaccaacttattctgattttgtttttccaaactgcttctcctcttgggaagtgtaaggaagctgcagcaccaggatcagtgaaacgcaccagacggccgcgtcagagcagctcaggttctgggagagggta

SEQ ID NO: 1511 - RNA, 4946 nt, synthetic construct
  source 1..4946: mol_type = other RNA; note = Engineered landing pad
gggtctctctggttagaccagatctgagcctgggagctctctggctaactagggaacccactgcttaagcctcaataaagcttgccttgagtgcttcaagtagtgtgtgcccgtctgttgtgtgactctggtaactagagatccctcagacccttttagtcagtgtggaaaatctctagcagtggcgcccgaacagggacttgaaagcgaaagggaaaccagaggagctctctcgacgcaggactcggcttgctgaagcgcgcacggcaagaggcgaggggcggcgactggtgagtacgccaaaaattttgactagcggaggctagaaggagagagatgggtgcgagagcgtcagtattaagcgggggagaattagatcgcgatgggaaaaaattcggttaaggccagggggaaagaaaaaatataaattaaaacatatagtatgggcaagcagggagctagaacgattcgcagttaatcctggcctgttagaaacatcagaaggctgtagacaaatactgggacagctacaaccatcccttcagacaggatcagaagaacttagatcattatataatacagtagcaaccctctattgtgtgcatcaaaggatagagataaaagacaccaaggaagctttagacaagatagaggaagagcaaaacaaaagtaagaccaccgcacagcaagcggccgctgatcttcagacctggaggaggagatatgagggacaattggagaagtgaattatataaatataaagtagtaaaaattgaaccattaggagtagcacccaccaaggcaaagagaagagtggtgcagagagaaaaaagagcagtgggaataggagctttgttccttgggttcttgggagcagcaggaagcactatgggcgcagcgtcaatgacgctgacggtacaggccagacaattattgtctggtatagtgcagcagcagaacaatttgctgagggctattgaggcgcaacagcatctgttgcaactcacagtctggggcatcaagcagctccaggcaagaatcctggctgtggaaagatacctaaaggatcaacagctcctggggatttggggttgctctggaaaactcatttgcaccactgctgtgccttggaatgctagttggagtaataaatctctggaacagatttggaatcacacgacctggatggagtgggacagagaaattaacaattacacaagcttaatacactccttaattgaagaatcgcaaaaccagcaagaaaagaatgaacaagaattattggaattagataaatgggcaagtttgtggaattggtttaacataacaaattggctgtggtatataaaattattcataatgatagtaggaggcttggtaggtttaagaatagtttttgctgtactttctatagtgaatagagttaggcagggatattcaccattatcgtttcagacccacctcccaaccccgaggggacccgacaggcccgaaggaatagaagaagaaggtggagagagagacagagacagatccattcgattagtgaacggatctcgacggtatcgatcacgagactagcctcgagcggccgcccccttcaccgagggcctatttcccatgattccttcatatttgcatatacgatacaaggctgttagagagataattggaattaatttgactgtaaacacaaagatattagtacaaaatacgtgacgtagaaagtaataatttcttgggtagtttgcagttttaaaattatgttttaaaatggactatcatatgccaagtacgccccctattgacgtcaatgacggtaaatggcccgcctggcattatgcccagtacatgaccttatgggactttcctacttggcagtacatctacgtattagtcatcgctattaccatggtgatgcggttttggcagtacatcaatgggcgtggatagcggtttgactcacggggatttccaagtctccaccccattgacgtcaatgggagtttgttttggcaccaaaatcaacgggactttccaaaatgtcgtaacaactccgccccattgacgcaaatgggcggtaggcgtgtacggtgggaggtctatataagcagagctggtttagtgaaccgtcagatccgctagcgctaccggtcgccaccatggccaagcctttgtctcaagaagaatccaccctcattgaaagagcaacggctacaatcaacagcatccccatctctgaagactacagcgtcgccagcgcagctctctctagcgacggccgcatcttcactggtgtcaatgtatatcattttactgggggaccttgtgcagaactcgtggtgctgggcactgctgctgctgcggcagctggcaacctgacttgtatcgtcgcgatcggaaatgagaacaggggcatcttgagcccctgcggacggtgccgacaggtgcttctcgatctgcatcctgggatcaaagccatagtgaaggacagtgatggacagccgacggcagttgggattcgtgaattgctgccctctggttatgtgtgggagggctaaaacttgtttattgcagcttataatggttacaaataaagcaatagcatcacaaatttcacaaataaagcatttttttcactgcattctagttgtggtttgtccaaactcatcaatgtatcttagaattctcgacctcgagacaaatggcagtattcatccacaattttaaaagaaaaggggggattggggggtacagtgcaggggaaagaatagtagacataatagcaacagacatacaaactaaagaattacaaaaacaaattacaaaaattcaaaattttcgggtttattacagggacagcagagatccactttggccgcggctcgagggggttggggttgcgccttttccaaggcagccctgggtttgcgcagggacgcggctgctctgggcgtggttccgggaaacgcagcggcgccgaccctgggtctcgcacattcttcacgtccgttcgcagcgtcacccggatcttcgccgctacccttgtgggccccccggcgacgcttcctgctccgcccctaagtcgggaaggttccttgcggttcgcggcgtgccggacgtgacaaacggaagccgcacgtctcactagtaccctcgcagacggacagcgccagggagcaatggcagcgcgccgaccgcgatgggctgtggccaatagcggctgctcagcagggcgcgccgagagcagcggccgggaaggggcggtgcgggaggcggggtgtggggcggtagtgtgggccctgttcctgcccgcgcggtgttccgcattctgcaagcctccggagcgcacgtcggcagtcggctccctcgttgaccgaatcaccgacctctctccccagggggatccctaaaaagcttccgcctgatgggggggttgaacgtccatactgtcggctacccgggttgtcatggcataagtataagacagcaggctgagaacgtccaagcaagggagcgaccgtcaatacgaaacatcatgggttcccgagaccctaaaacaggacgatgtgcggctaaagcacgtcgtttagcacccggctgaaaaccatggcctacggtgtctttgcaaatggaactcaaccagagggccaaaaactgtacgcttgcgtttagcgtcctaaactaaaacatcgaccgaaagcgtaaaggaagcacgtggggacatatacgtgtaagggcacccattaaaccttgccccacaatggagcacagaactggcaaacaggcgtggctgagaaggtacggatcaccaaatcttagtggggcactgagcaatccaaagttaacggaaccctcacgttcgagtacgaccagctaacttgacattagcagcccagcgcccaggcaatagaagacgtgctggcgtcaccggcgccatacgggtgtctccatcttgctgcctgcaaaatcgatgggctgaatctgaagtgtactactccggcaaatactcgaaacttgcattagtctgatacctgtgcgaactcggaagcgatccgagagtgtataaacatgtacgtaagtgacgacaggaagaactggaaaattatcggaaacggtaggccactatcgactactggctatccgcgccagccactcccgcattgcacgccacagcattggccactcagagaagcgggaccgtgtctcacgccactaatatacgtcattaagagttcaacgccactaaaccctatgcccaaatgaggaaggaaaactagagtcatgatcagcgagaaggaaacattgcactcgttgccaacggaaggaaagaatagatttgtcagttagggaaggaaatactaacgccgctcctacaggaaggaaatttgctaaacctagccccaatacttattttggactagcctgttcgcgagtagtttcctcattgtatgaacgcaatagctttgtagaatcgaccgacactaatgttttgtttactggagtttgcgactcggctaaacgagatcgagaaaggtagggggagcagctgtcaggtcttgtgggtgcattgttgagcgggcgcgctgggacgacaatcatggtgaaagcgggggcgtactttttggaatccgtctagggggtacctttaagaccaatgacttacaaggcagctgtagatcttagccactttttaaaagaaaaggggggactggaagggctaattcactcccaacgaagacaagatctgctttttgcttgtactgggtctctctggttagaccagatctgagcctgggagctctctggctaactagggaacccactgcttaagcctcaataaagcttgccttgagtgcttcaagtagtgtgtgcccgtctgttgtgtgactctggtaactagagatccctcagacccttttagtcagtgtggaaaatctctagca

SEQ ID NO: 1512 - RNA, 105 nt, synthetic construct
  source 1..105: mol_type = other RNA; note = Cas9 sg1
  modified_base 1..3: mod_base = OTHER; note = 2'O-methyl ribonucleotide
  modified_base 1..4: mod_base = OTHER; note = phosphorothioate linkage
  modified_base 103..105: mod_base = OTHER; note = 2'O-methyl ribonucleotide
  modified_base 102..105: mod_base = OTHER; note = phosphorothioate linkage
ctaaacgagatcgagaaaggtagttttagagctagaaatagcaagttaaaataaggctagtccgttatcaacttgaaaaagtggcaccgagtcggtgcttttttt

SEQ ID NO: 1513 - RNA, 105 nt, synthetic construct
  source 1..105: mol_type = other RNA; note = Cas9 sg2
  modified_base 1..3: mod_base = OTHER; note = 2'O-methyl ribonucleotide
  modified_base 1..4: mod_base = OTHER; note = phosphorothioate linkage
  modified_base 103..105: mod_base = OTHER; note = 2'O-methyl ribonucleotide
  modified_base 102..105: mod_base = OTHER; note = phosphorothioate linkage
gggagcagctgtcaggtcttgtgttttagagctagaaatagcaagttaaaataaggctagtccgttatcaacttgaaaaagtggcaccgagtcggtgcttttttt

SEQ ID NO: 1514 - RNA, 105 nt, synthetic construct
  source 1..105: mol_type = other RNA; note = Cas9 sg3
  modified_base 1..3: mod_base = OTHER; note = 2'O-methyl ribonucleotide
  modified_base 1..4: mod_base = OTHER; note = phosphorothioate linkage
  modified_base 103..105: mod_base = OTHER; note = 2'O-methyl ribonucleotide
  modified_base 102..105: mod_base = OTHER; note = phosphorothioate linkage
tgcattgttgagcgggcgcgctgttttagagctagaaatagcaagttaaaataaggctagtccgttatcaacttgaaaaagtggcaccgagtcggtgcttttttt

SEQ ID NO: 1515 - RNA, 105 nt, synthetic construct
  source 1..105: mol_type = other RNA; note = Cas9 sg4
  modified_base 1..3: mod_base = OTHER; note = 2'O-methyl ribonucleotide
  modified_base 1..4: mod_base = OTHER; note = phosphorothioate linkage
  modified_base 103..105: mod_base = OTHER; note = 2'O-methyl ribonucleotide
  modified_base 102..105: mod_base = OTHER; note = phosphorothioate linkage
acgacaatcatggtgaaagcgggttttagagctagaaatagcaagttaaaataaggctagtccgttatcaacttgaaaaagtggcaccgagtcggtgcttttttt

SEQ ID NO: 1516 - RNA, 105 nt, synthetic construct
  source 1..105: mol_type = other RNA; note = Cas9 sg5
  modified_base 1..3: mod_base = OTHER; note = 2'O-methyl ribonucleotide
  modified_base 1..4: mod_base = OTHER; note = phosphorothioate linkage
  modified_base 103..105: mod_base = OTHER; note = 2'O-methyl ribonucleotide
  modified_base 102..105: mod_base = OTHER; note = phosphorothioate linkage
cgtactttttggaatccgtctagttttagagctagaaatagcaagttaaaataaggctagtccgttatcaacttgaaaaagtggcaccgagtcggtgcttttttt

SEQ ID NO: 1517 - skipped

SEQ ID NO: 1518 - DNA, 23 bp, synthetic construct
  source 1..23: mol_type = other DNA; note = Cas9 FP Lpad
aaacctagccccaatacttattt

SEQ ID NO: 1519 - DNA, 21 bp, synthetic construct
  source 1..21: mol_type = other DNA; note = Cas9 RPonLTR Lpad
cttgtcttcgttgggagtgaa

SEQ ID NO: 1520 - DNA, 8160 bp, synthetic construct
  source 1..8160: mol_type = other DNA; note = FH-Cas9 WT-MG140-3-MCP
atggactacaaagacgatgacgacaagtacccctatgatgtacctgattatgctcctaagaagaaaagaaaggtggataagaaatatagtattgggttggatattggtacgaatagtgtaggatgggcggttattactgacgaatataaagtcccctctaagaagtttaaagtcctcggtaatacagataggcatagtattaagaagaatcttattggcgctctcttatttgattccggtgagactgctgaagctacaaggttaaagaggactgctcgccggcgctatacacgaaggaagaatcgcatatgttaccttcaggaaatatttagtaatgaaatggcaaaagtcgatgattcattcttccatcgacttgaggaatcatttctcgttgaggaagacaagaagcatgaaaggcatccaatctttggaaatatagtcgatgaagtagcttatcatgagaaatatccgactatttatcatttgcgaaagaagcttgtcgattctacagataaagcggatcttaggcttatatacctcgcactcgctcatatgattaaatttaggggtcattttctgattgaaggggatctcaatcctgataattccgatgtagataagctctttattcaacttgtacaaacatataatcaattatttgaagagaatcctattaatgcttctggagtcgatgcaaaagcgattttgagcgctcgcctttccaaaagtcgcagacttgagaacttgattgctcaactcccaggtgaaaagaagaacggactctttggtaatttgatcgcattgagtcttgggttgactccaaattttaaaagtaattttgatttggctgaagacgcaaagctccaattgtccaaagatacttatgatgatgatttggataatttattagcccaaattggagatcaatatgctgatctcttcctcgcagctaagaatctctcagatgcaattttgttgtctgatatacttcgcgtaaatactgaaattacaaaagctcctctctccgcaagcatgataaaacggtatgatgaacatcatcaagatcttactcttcttaaggccttagtacgccaacaacttccggagaaatataaggaaatcttctttgatcaatcaaagaatgggtatgcagggtatatagatggcggcgcgtcacaagaggaattttataaatttataaaaccgattcttgagaaaatggatggaacagaagagcttttggtcaaattaaatagggaagatttgttgaggaaacaaagaacctttgataatgggtctattccacatcaaatacatcttggcgaattgcacgcgatactcaggcgacaagaggacttctatccttttcttaaagataatcgcgagaaaattgaaaagattctcacgtttcggattccttattatgttggaccgttagcgcggggtaattcacggtttgcttggatgactaggaaatcagaagagactattacgccttggaattttgaagaggttgtcgataaaggagcctcagctcaatcttttattgaacgaatgactaattttgacaagaatctccctaatgaaaaggtcttgcctaaacatagtcttctctatgaatattttacagtctacaatgaattgacaaaggttaagtatgtcacagaaggtatgaggaaacctgcatttctgagtggggaacaaaagaaagcgattgtcgatctcctctttaaaacgaatagaaaggtcacggtaaaacaattaaaggaagattattttaagaagattgaatgttttgattcagtcgagatctctggggtcgaggacagatttaatgcaagcttgggtacctatcatgacttgctcaagatcattaaagataaagattttctcgataacgaagagaatgaagacatccttgaggacatagtccttactctcaccctcttcgaagatcgggaaatgattgaagagcgccttaagacatacgcacatctctttgatgataaggttatgaaacaactcaaacgccgacggtatacaggatggggaagacttagtcgcaaactcataaatggaataagggataaacaatcaggaaagaccattcttgactttcttaaatctgatggatttgcaaatcgcaatttcatgcaactcattcatgatgattccctcacattcaaggaagatatacaaaaggcacaagtcagtgggcaaggggactcccttcatgaacatatcgcaaaccttgctggttctcctgcaatcaagaagggaatactccaaactgtaaaagtcgtcgatgaacttgttaaggtaatgggacgccataaaccggaaaatattgtaatagagatggcgcgagaaaatcaaacgactcaaaagggccagaagaatagcagagaaaggatgaaacgcatagaggaagggataaaggaattggggtcccaaattttgaaggagcatccagtagagaatactcaattgcaaaatgagaaactctatctttattatctccaaaacggcagggacatgtatgtcgatcaagagttagatataaatcgccttagtgattatgacgtagatcacattgtcccccaatccttccttaaagatgatagtattgataataaagtcttgactaggagtgataagaatcgcgggaaaagtgataatgtaccatctgaggaagtagtaaagaaaatgaagaattattggcgacaactcctcaatgcaaaattgatcacgcaacgaaaatttgataacttgacgaaagctgaacggggcggactctccgagcttgacaaagcagggtttattaaacgccaattggtcgagactagacaaattacgaaacatgttgctcaaattcttgatagcagaatgaataccaaatatgatgaaaacgataaattgattcgagaggtcaaggtaattacactcaaatcaaaattagtctctgactttaggaaagactttcaattctataaggtaagggaaattaataattatcatcatgcgcatgatgcatatttgaatgctgtggtcggcacagcgttgattaagaaatatcccaaattagagtcagaatttgtttatggagattataaagtctatgatgttaggaaaatgattgcaaagtctgagcaagagattgggaaagcgacagcaaaatatttcttttatagtaatattatgaacttctttaaaacggaaatcactctcgctaatggggaaattcgcaaaagaccccttattgaaactaatggtgagacaggcgaaattgtttgggacaaaggacgtgacttcgctacagtccgcaaggttctttctatgccacaggtaaacattgttaagaaaactgaagtccaaactggcggtttctccaaggaaagcattctccctaaacgcaatagtgacaaattgattgcaaggaagaaggattgggatccaaagaaatatggtgggtttgattcaccgacagttgcgtacagtgtccttgttgtagctaaggtagagaaaggaaaatccaagaagcttaaatcagttaaggaattattaggcattacaattatggagaggtccagttttgagaagaacccgatagatttcttagaggctaaagggtacaaagaggttaagaaagatcttattataaaacttccaaaatatagtctctttgaactggagaatggacgaaaacgaatgcttgcaagtgctggagagttacaaaagggcaatgagctcgctttaccaagcaagtacgtaaattttctctatcttgcatcccattacgaaaagttgaaaggtagtccagaagacaacgaacaaaagcaattattcgtagagcaacataaacattatcttgatgaaattattgaacagattagtgaattttcaaaacgcgttatactcgcagatgccaacttagataaggtactctctgcttataataaacatagggacaaacctatacgagaacaagcggaaaacattattcatttgttcacactcactaacctcggcgctccagctgcttttaaatatttcgatactacaatagatagaaaacgttatacttctacaaaggaagtcttagatgctacactcattcatcaaagtattacaggattatatgaaactcgtatagatctctcacaactcggcggggattctggcggcagcagcggcggctcaagcggaagtgaaacacctggaacttccgaaagcgctacgcctgaatcttctggtggatcttctggcggatcttccgcatgcgtcgactcacattctactgctgccgcttcttccggagccgcaactggccctatagtcataagataccctgtaaacaccactaatggcgggacgaccggagaacaagcctgcttctttgctgagtcaagcaactgcgggctggctttcgtggacaataagtcatttgtggaccatctgttgcgggcccataaggcgacacgagatcaaattcaatatatatgttctcattgtcataggcagtttgagaaaatcgaaagcgttcgatcacatcataacatttgcaagcggaaggaagctgttgccccggacttagatgctaggctgccagtggaatgcgaagtggacgggtgttcacgccgctttacgactacgtccgggatgcggctgcacgtgaagaaagcacatccaattgaatatcacgcatctatacctcaatctaaaagaaatttgtggagcgaaggggagatgcggatgctggctcgtatggagctggacaatccgggactgacaaatgcgaggatgaacgaattgctgcatagtcttcatccttccaggtcagttgatgtcatcagacatatgcgcgggagaaacactcgatatagggaaatcatggaagagctcgtgttgattggcgttccagaggatagtgatagccaagccgaaaagacagcagaaccggagccagaaggaagaatcaatgaatgccagctggaagaactggtaaagacgcattcacaaattgatgacgcgcgataccaagccagtattgaatacgtacgtagggtacttcggtctgacgatccaggtgagttcttcaatgactggcttttcagttgcttccctggcaaggaaggccggcggattcagcgtcgaaaacgtgaacggctgcccccacgcaatgcaaaacagaagcgggccgcagaatttcgggtgctgcaggagctgtggcggaaagatcgttcaagacttgcaaccgtcatccttgataagatgccacctacggctaaagaaccgccgattggcgatatagaaaaggtgtatactaccaggttcgaacggcccagtccagaggaccaacatgagtttacgtccaagcctattgaggagcctatggagatggtacggtttatcacagttgaggaagttcttaagaatttaaaagccatgaagtctaacaacgcccccgggttggactctaacataacaatgaagcgtcttcggtccttgccgttgccctgccttcagctcgtctttaattgttggttggccatcggaaaggctccacagagtatgaaacaatgtcggagcaagctgcttcccaaaggggccgaaggtctggatgatgtaaataattggcgtcctttgaccataggctctctcttgatccggttatatacccggatccttgctatgcgcttacagtctaaagtccagctgcatcccagacaaaaggcctttcaacctttggacggatgcggagaaaatatcgcaatagtgtcatctttgctgcaagatgcgcacgaacgcaagaaagaattaaacatcatatttctggacatcgcgaaggcttttgattgcgtgtcacatcacagcattcaacgggcactgaatagatttggcttgccacgcgcttttcgacgtgtgatcgaagatctgtatgatggtgccacaacagtgtttcaaacatcagagggcgatagcaagacccttgggattagctctggagtaaaacaaggttgtcccttgtcccccgtccttttcaatatggtcatggacgaactcatcgctgacgcaccctctacggagtggggctatgagcttcacgacgaatccgtcgggctcctggcatttgctgacgacattgccctggtgagccattctagggcaatgatgtcacacgcgcttgattatgctgcaggcttcttcgaaaagagaaacttacaactgaacgccaggaagtgtattgggcttagtatcaagaaagctccccgccgaaaggttatgcggatcgaaatggggagtatctggagtctccgcaatgggtctgacaacattcccatcaaaatgctttctcccgccgacatggctcgctatcttggagccctgttttccccgtctgggaagcaaacaattgatctcgccactatgaagggctggattacgtccatagaaaagagcagactcaaaccgcaccaaaagttggtgatgctgcgaacgtaccttcttccgagggtactccatcacctcactattggagaaccaaacgcaactaccttgcgtcgggttgagagggaactgcgcaattcagtgaagcggtttctcaaattgcctgtggccactgccacacccttctttcatattagcacaaaagagggtggactcgagttaccacctttgctcgagaccatagcaaaacgaaaactgaagtgggaaataaggttacagaaatcaaaggattccttgattcgagccgtcgctgactctccaaaattccgtaaacaatttgacaaagctcgggcctggattggagtgccggtgattaatcgaccaagtgacatcaataggcgaatccgagagctgaataacggcaggtttgaaaggttcacgtctgagctggctgtccaatcccggtgtcatagggctctggccagcaatcccttgcgaaatgattggctgaccggacacaaccccgggctttacgcatcacaatttatagacgcattgaaacttgtcactagccaactgcccacccgcgaagcactgaatcggggaaacccccaggccgataaaaggtgtcggggctgtggattctccgtagagaatcaaaagcacgtcatcagtaattgtcccctggtccaacaagagcgtcatctgcgccataatcgtgtcgcccagctgtttgctcgttacgccaaagagaaaggatggaatattatagcagaacctcggatcaggaatcccagcggcgaaatcatgcgtccggacatcgttctgcggcgagatgataacgtagctatcgtagacatccaaatcccttatgaagacggcggtcgcgaacaattggctgaacgatatagacaaaagtgcagcaaatatcggcagttaagcacccacattcagcatgtgctgggagttaccaatcataccattggtgcgattattgttggtgcttgtggcacatggtgcgagcttaacaatcccatcttggattacataggagtcaatactacagccataaagaagaatctcagcattgaagctttgaggggcacactgaaaatattcggccaatttaagaatagggtgtttagaaatgagagagtgcatccatcacagcggccaagctccggcccaccagtaccagatatctctggcggcagcagcggcggctcaagcggaagtgaaacacctggaacttccgaaagcgctacgcctgaatcttctggtggatcttctggcggatcttccgccagcaatttcacacagttcgtccttgtagacaacggcggcaccggggatgttacagtggccccgagcaatttcgcaaacggcgtagccgagtggatctcctctaatagcagaagccaggcttataaggttacatgctctgtaaggcagtcttccgcacaaaatagaaagtacacaatcaaggtcgaagtgcccaaggttgctacacagaccgttggtggagaggagttgccagtggctgggtggcgctcctacctgaatatggagttaacaatccccattttcgctaccaattcagactgtgaactcattgtcaaagctatgcaaggtcttcttaaggatggtaacccaattccaagtgcaattgctgctaattcaggcatttatcctaagaagaaaagaaaggtgtga

SEQ ID NO: 1521 - DNA, 8160 bp, synthetic construct
  source 1..8160: mol_type = other DNA; note = FH-MCP-MG140-3-Cas9 WT
atggactacaaagacgatgacgacaagtacccctatgatgtacctgattatgctcctaagaagaaaagaaaggtggccagcaatttcacacagttcgtccttgtagacaacggcggcaccggggatgttacagtggccccgagcaatttcgcaaacggcgtagccgagtggatctcctctaatagcagaagccaggcttataaggttacatgctctgtaaggcagtcttccgcacaaaatagaaagtacacaatcaaggtcgaagtgcccaaggttgctacacagaccgttggtggagaggagttgccagtggctgggtggcgctcctacctgaatatggagttaacaatccccattttcgctaccaattcagactgtgaactcattgtcaaagctatgcaaggtcttcttaaggatggtaacccaattccaagtgcaattgctgctaattcaggcatttattctggcggcagcagcggcggctcaagcggaagtgaaacacctggaacttccgaaagcgctacgcctgaatcttctggtggatcttctggcggatcttccgcatgcgtcgactcacattctactgctgccgcttcttccggagccgcaactggccctatagtcataagataccctgtaaacaccactaatggcgggacgaccggagaacaagcctgcttctttgctgagtcaagcaactgcgggctggctttcgtggacaataagtcatttgtggaccatctgttgcgggcccataaggcgacacgagatcaaattcaatatatatgttctcattgtcataggcagtttgagaaaatcgaaagcgttcgatcacatcataacatttgcaagcggaaggaagctgttgccccggacttagatgctaggctgccagtggaatgcgaagtggacgggtgttcacgccgctttacgactacgtccgggatgcggctgcacgtgaagaaagcacatccaattgaatatcacgcatctatacctcaatctaaaagaaatttgtggagcgaaggggagatgcggatgctggctcgtatggagctggacaatccgggactgacaaatgcgaggatgaacgaattgctgcatagtcttcatccttccaggtcagttgatgtcatcagacatatgcgcgggagaaacactcgatatagggaaatcatggaagagctcgtgttgattggcgttccagaggatagtgatagccaagccgaaaagacagcagaaccggagccagaaggaagaatcaatgaatgccagctggaagaactggtaaagacgcattcacaaattgatgacgcgcgataccaagccagtattgaatacgtacgtagggtacttcggtctgacgatccaggtgagttcttcaatgactggcttttcagttgcttccctggcaaggaaggccggcggattcagcgtcgaaaacgtgaacggctgcccccacgcaatgcaaaacagaagcgggccgcagaatttcgggtgctgcaggagctgtggcggaaagatcgttcaagacttgcaaccgtcatccttgataagatgccacctacggctaaagaaccgccgattggcgatatagaaaaggtgtatactaccaggttcgaacggcccagtccagaggaccaacatgagtttacgtccaagcctattgaggagcctatggagatggtacggtttatcacagttgaggaagttcttaagaatttaaaagccatgaagtctaacaacgcccccgggttggactctaacataacaatgaagcgtcttcggtccttgccgttgccctgccttcagctcgtctttaattgttggttggccatcggaaaggctccacagagtatgaaacaatgtcggagcaagctgcttcccaaaggggccgaaggtctggatgatgtaaataattggcgtcctttgaccataggctctctcttgatccggttatatacccggatccttgctatgcgcttacagtctaaagtccagctgcatcccagacaaaaggcctttcaacctttggacggatgcggagaaaatatcgcaatagtgtcatctttgctgcaagatgcgcacgaacgcaagaaagaattaaacatcatatttctggacatcgcgaaggcttttgattgcgtgtcacatcacagcattcaacgggcactgaatagatttggcttgccacgcgcttttcgacgtgtgatcgaagatctgtatgatggtgccacaacagtgtttcaaacatcagagggcgatagcaagacccttgggattagctctggagtaaaacaaggttgtcccttgtcccccgtccttttcaatatggtcatggacgaactcatcgctgacgcaccctctacggagtggggctatgagcttcacgacgaatccgtcgggctcctggcatttgctgacgacattgccctggtgagccattctagggcaatgatgtcacacgcgcttgattatgctgcaggcttcttcgaaaagagaaacttacaactgaacgccaggaagtgtattgggcttagtatcaagaaagctccccgccgaaaggttatgcggatcgaaatggggagtatctggagtctccgcaatgggtctgacaacattcccatcaaaatgctttctcccgccgacatggctcgctatcttggagccctgttttccccgtctgggaagcaaacaattgatctcgccactatgaagggctggattacgtccatagaaaagagcagactcaaaccgcaccaaaagttggtgatgctgcgaacgtaccttcttccgagggtactccatcacctcactattggagaaccaaacgcaactaccttgcgtcgggttgagagggaactgcgcaattcagtgaagcggtttctcaaattgcctgtggccactgccacacccttctttcatattagcacaaaagagggtggactcgagttaccacctttgctcgagaccatagcaaaacgaaaactgaagtgggaaataaggttacagaaatcaaaggattccttgattcgagccgtcgctgactctccaaaattccgtaaacaatttgacaaagctcgggcctggattggagtgccggtgattaatcgaccaagtgacatcaataggcgaatccgagagctgaataacggcaggtttgaaaggttcacgtctgagctggctgtccaatcccggtgtcatagggctctggccagcaatcccttgcgaaatgattggctgaccggacacaaccccgggctttacgcatcacaatttatagacgcattgaaacttgtcactagccaactgcccacccgcgaagcactgaatcggggaaacccccaggccgataaaaggtgtcggggctgtggattctccgtagagaatcaaaagcacgtcatcagtaattgtcccctggtccaacaagagcgtcatctgcgccataatcgtgtcgcccagctgtttgctcgttacgccaaagagaaaggatggaatattatagcagaacctcggatcaggaatcccagcggcgaaatcatgcgtccggacatcgttctgcggcgagatgataacgtagctatcgtagacatccaaatcccttatgaagacggcggtcgcgaacaattggctgaacgatatagacaaaagtgcagcaaatatcggcagttaagcacccacattcagcatgtgctgggagttaccaatcataccattggtgcgattattgttggtgcttgtggcacatggtgcgagcttaacaatcccatcttggattacataggagtcaatactacagccataaagaagaatctcagcattgaagctttgaggggcacactgaaaatattcggccaatttaagaatagggtgtttagaaatgagagagtgcatccatcacagcggccaagctccggcccaccagtaccagatatctctggcggcagcagcggcggctcaagcggaagtgaaacacctggaacttccgaaagcgctacgcctgaatcttctggtggatcttctggcggatcttccgataagaaatatagtattgggttggatattggtacgaatagtgtaggatgggcggttattactgacgaatataaagtcccctctaagaagtttaaagtcctcggtaatacagataggcatagtattaagaagaatcttattggcgctctcttatttgattccggtgagactgctgaagctacaaggttaaagaggactgctcgccggcgctatacacgaaggaagaatcgcatatgttaccttcaggaaatatttagtaatgaaatggcaaaagtcgatgattcattcttccatcgacttgaggaatcatttctcgttgaggaagacaagaagcatgaaaggcatccaatctttggaaatatagtcgatgaagtagcttatcatgagaaatatccgactatttatcatttgcgaaagaagcttgtcgattctacagataaagcggatcttaggcttatatacctcgcactcgctcatatgattaaatttaggggtcattttctgattgaaggggatctcaatcctgataattccgatgtagataagctctttattcaacttgtacaaacatataatcaattatttgaagagaatcctattaatgcttctggagtcgatgcaaaagcgattttgagcgctcgcctttccaaaagtcgcagacttgagaacttgattgctcaactcccaggtgaaaagaagaacggactctttggtaatttgatcgcattgagtcttgggttgactccaaattttaaaagtaattttgatttggctgaagacgcaaagctccaattgtccaaagatacttatgatgatgatttggataatttattagcccaaattggagatcaatatgctgatctcttcctcgcagctaagaatctctcagatgcaattttgttgtctgatatacttcgcgtaaatactgaaattacaaaagctcctctctccgcaagcatgataaaacggtatgatgaacatcatcaagatcttactcttcttaaggccttagtacgccaacaacttccggagaaatataaggaaatcttctttgatcaatcaaagaatgggtatgcagggtatatagatggcggcgcgtcacaagaggaattttataaatttataaaaccgattcttgagaaaatggatggaacagaagagcttttggtcaaattaaatagggaagatttgttgaggaaacaaagaacctttgataatgggtctattccacatcaaatacatcttggcgaattgcacgcgatactcaggcgacaagaggacttctatccttttcttaaagataatcgcgagaaaattgaaaagattctcacgtttcggattccttattatgttggaccgttagcgcggggtaattcacggtttgcttggatgactaggaaatcagaagagactattacgccttggaattttgaagaggttgtcgataaaggagcctcagctcaatcttttattgaacgaatgactaattttgacaagaatctccctaatgaaaaggtcttgcctaaacatagtcttctctatgaatattttacagtctacaatgaattgacaaaggttaagtatgtcacagaaggtatgaggaaacctgcatttctgagtggggaacaaaagaaagcgattgtcgatctcctctttaaaacgaatagaaaggtcacggtaaaacaattaaaggaagattattttaagaagattgaatgttttgattcagtcgagatctctggggtcgaggacagatttaatgcaagcttgggtacctatcatgacttgctcaagatcattaaagataaagattttctcgataacgaagagaatgaagacatccttgaggacatagtccttactctcaccctcttcgaagatcgggaaatgattgaagagcgccttaagacatacgcacatctctttgatgataaggttatgaaacaactcaaacgccgacggtatacaggatggggaagacttagtcgcaaactcataaatggaataagggataaacaatcaggaaagaccattcttgactttcttaaatctgatggatttgcaaatcgcaatttcatgcaactcattcatgatgattccctcacattcaaggaagatatacaaaaggcacaagtcagtgggcaaggggactcccttcatgaacatatcgcaaaccttgctggttctcctgcaatcaagaagggaatactccaaactgtaaaagtcgtcgatgaacttgttaaggtaatgggacgccataaaccggaaaatattgtaatagagatggcgcgagaaaatcaaacgactcaaaagggccagaagaatagcagagaaaggatgaaacgcatagaggaagggataaaggaattggggtcccaaattttgaaggagcatccagtagagaatactcaattgcaaaatgagaaactctatctttattatctccaaaacggcagggacatgtatgtcgatcaagagttagatataaatcgccttagtgattatgacgtagatcacattgtcccccaatccttccttaaagatgatagtattgataataaagtcttgactaggagtgataagaatcgcgggaaaagtgataatgtaccatctgaggaagtagtaaagaaaatgaagaattattggcgacaactcctcaatgcaaaattgatcacgcaacgaaaatttgataacttgacgaaagctgaacggggcggactctccgagcttgacaaagcagggtttattaaacgccaattggtcgagactagacaaattacgaaacatgttgctcaaattcttgatagcagaatgaataccaaatatgatgaaaacgataaattgattcgagaggtcaaggtaattacactcaaatcaaaattagtctctgactttaggaaagactttcaattctataaggtaagggaaattaataattatcatcatgcgcatgatgcatatttgaatgctgtggtcggcacagcgttgattaagaaatatcccaaattagagtcagaatttgtttatggagattataaagtctatgatgttaggaaaatgattgcaaagtctgagcaagagattgggaaagcgacagcaaaatatttcttttatagtaatattatgaacttctttaaaacggaaatcactctcgctaatggggaaattcgcaaaagaccccttattgaaactaatggtgagacaggcgaaattgtttgggacaaaggacgtgacttcgctacagtccgcaaggttctttctatgccacaggtaaacattgttaagaaaactgaagtccaaactggcggtttctccaaggaaagcattctccctaaacgcaatagtgacaaattgattgcaaggaagaaggattgggatccaaagaaatatggtgggtttgattcaccgacagttgcgtacagtgtccttgttgtagctaaggtagagaaaggaaaatccaagaagcttaaatcagttaaggaattattaggcattacaattatggagaggtccagttttgagaagaacccgatagatttcttagaggctaaagggtacaaagaggttaagaaagatcttattataaaacttccaaaatatagtctctttgaactggagaatggacgaaaacgaatgcttgcaagtgctggagagttacaaaagggcaatgagctcgctttaccaagcaagtacgtaaattttctctatcttgcatcccattacgaaaagttgaaaggtagtccagaagacaacgaacaaaagcaattattcgtagagcaacataaacattatcttgatgaaattattgaacagattagtgaattttcaaaacgcgttatactcgcagatgccaacttagataaggtactctctgcttataataaacatagggacaaacctatacgagaacaagcggaaaacattattcatttgttcacactcactaacctcggcgctccagctgcttttaaatatttcgatactacaatagatagaaaacgttatacttctacaaaggaagtcttagatgctacactcattcatcaaagtattacaggattatatgaaactcgtatagatctctcacaactcggcggggatcctaagaagaaaagaaaggtgtga

SEQ ID NO: 1522 - DNA, 8160 bp, synthetic construct
  source 1..8160: mol_type = other DNA; note = FH-Cas9 Nickase-MG140-3-MCP
atggactacaaagacgatgacgacaagtacccctatgatgtacctgattatgctcctaagaagaaaagaaaggtggataagaaatatagtattgggttggatattggtacgaatagtgtaggatgggcggttattactgacgaatataaagtcccctctaagaagtttaaagtcctcggtaatacagataggcatagtattaagaagaatcttattggcgctctcttatttgattccggtgagactgctgaagctacaaggttaaagaggactgctcgccggcgctatacacgaaggaagaatcgcatatgttaccttcaggaaatatttagtaatgaaatggcaaaagtcgatgattcattcttccatcgacttgaggaatcatttctcgttgaggaagacaagaagcatgaaaggcatccaatctttggaaatatagtcgatgaagtagcttatcatgagaaatatccgactatttatcatttgcgaaagaagcttgtcgattctacagataaagcggatcttaggcttatatacctcgcactcgctcatatgattaaatttaggggtcattttctgattgaaggggatctcaatcctgataattccgatgtagataagctctttattcaacttgtacaaacatataatcaattatttgaagagaatcctattaatgcttctggagtcgatgcaaaagcgattttgagcgctcgcctttccaaaagtcgcagacttgagaacttgattgctcaactcccaggtgaaaagaagaacggactctttggtaatttgatcgcattgagtcttgggttgactccaaattttaaaagtaattttgatttggctgaagacgcaaagctccaattgtccaaagatacttatgatgatgatttggataatttattagcccaaattggagatcaatatgctgatctcttcctcgcagctaagaatctctcagatgcaattttgttgtctgatatacttcgcgtaaatactgaaattacaaaagctcctctctccgcaagcatgataaaacggtatgatgaacatcatcaagatcttactcttcttaaggccttagtacgccaacaacttccggagaaatataaggaaatcttctttgatcaatcaaagaatgggtatgcagggtatatagatggcggcgcgtcacaagaggaattttataaatttataaaaccgattcttgagaaaatggatggaacagaagagcttttggtcaaattaaatagggaagatttgttgaggaaacaaagaacctttgataatgggtctattccacatcaaatacatcttggcgaattgcacgcgatactcaggcgacaagaggacttctatccttttcttaaagataatcgcgagaaaattgaaaagattctcacgtttcggattccttattatgttggaccgttagcgcggggtaattcacggtttgcttggatgactaggaaatcagaagagactattacgccttggaattttgaagaggttgtcgataaaggagcctcagctcaatcttttattgaacgaatgactaattttgacaagaatctccctaatgaaaaggtcttgcctaaacatagtcttctctatgaatattttacagtctacaatgaattgacaaaggttaagtatgtcacagaaggtatgaggaaacctgcatttctgagtggggaacaaaagaaagcgattgtcgatctcctctttaaaacgaatagaaaggtcacggtaaaacaattaaaggaagattattttaagaagattgaatgttttgattcagtcgagatctctggggtcgaggacagatttaatgcaagcttgggtacctatcatgacttgctcaagatcattaaagataaagattttctcgataacgaagagaatgaagacatccttgaggacatagtccttactctcaccctcttcgaagatcgggaaatgattgaagagcgccttaagacatacgcacatctctttgatgataaggttatgaaacaactcaaacgccgacggtatacaggatggggaagacttagtcgcaaactcataaatggaataagggataaacaatcaggaaagaccattcttgactttcttaaatctgatggatttgcaaatcgcaatttcatgcaactcattcatgatgattccctcacattcaaggaagatatacaaaaggcacaagtcagtgggcaaggggactcccttcatgaacatatcgcaaaccttgctggttctcctgcaatcaagaagggaatactccaaactgtaaaagtcgtcgatgaacttgttaaggtaatgggacgccataaaccggaaaatattgtaatagagatggcgcgagaaaatcaaacgactcaaaagggccagaagaatagcagagaaaggatgaaacgcatagaggaagggataaaggaattggggtcccaaattttgaaggagcatccagtagagaatactcaattgcaaaatgagaaactctatctttattatctccaaaacggcagggacatgtatgtcgatcaagagttagatataaatcgccttagtgattatgacgtagatgcaattgtcccccaatccttccttaaagatgatagtattgataataaagtcttgactaggagtgataagaatcgcgggaaaagtgataatgtaccatctgaggaagtagtaaagaaaatgaagaattattggcgacaactcctcaatgcaaaattgatcacgcaacgaaaatttgataacttgacgaaagctgaacggggcggactctccgagcttgacaaagcagggtttattaaacgccaattggtcgagactagacaaattacgaaacatgttgctcaaattcttgatagcagaatgaataccaaatatgatgaaaacgataaattgattcgagaggtcaaggtaattacactcaaatcaaaattagtctctgactttaggaaagactttcaattctataaggtaagggaaattaataattatcatcatgcgcatgatgcatatttgaatgctgtggtcggcacagcgttgattaagaaatatcccaaattagagtcagaatttgtttatggagattataaagtctatgatgttaggaaaatgattgcaaagtctgagcaagagattgggaaagcgacagcaaaatatttcttttatagtaatattatgaacttctttaaaacggaaatcactctcgctaatggggaaattcgcaaaagaccccttattgaaactaatggtgagacaggcgaaattgtttgggacaaaggacgtgacttcgctacagtccgcaaggttctttctatgccacaggtaaacattgttaagaaaactgaagtccaaactggcggtttctccaaggaaagcattctccctaaacgcaatagtgacaaattgattgcaaggaagaaggattgggatccaaagaaatatggtgggtttgattcaccgacagttgcgtacagtgtccttgttgtagctaaggtagagaaaggaaaatccaagaagcttaaatcagttaaggaattattaggcattacaattatggagaggtccagttttgagaagaacccgatagatttcttagaggctaaagggtacaaagaggttaagaaagatcttattataaaacttccaaaatatagtctctttgaactggagaatggacgaaaacgaatgcttgcaagtgctggagagttacaaaagggcaatgagctcgctttaccaagcaagtacgtaaattttctctatcttgcatcccattacgaaaagttgaaaggtagtccagaagacaacgaacaaaagcaattattcgtagagcaacataaacattatcttgatgaaattattgaacagattagtgaattttcaaaacgcgttatactcgcagatgccaacttagataaggtactctctgcttataataaacatagggacaaacctatacgagaacaagcggaaaacattattcatttgttcacactcactaacctcggcgctccagctgcttttaaatatttcgatactacaatagatagaaaacgttatacttctacaaaggaagtcttagatgctacactcattcatcaaagtattacaggattatatgaaactcgtatagatctctcacaactcggcggggattctggcggcagcagcggcggctcaagcggaagtgaaacacctggaacttccgaaagcgctacgcctgaatcttctggtggatcttctggcggatcttccgcatgcgtcgactcacattctactgctgccgcttcttccggagccgcaactggccctatagtcataagataccctgtaaacaccactaatggcgggacgaccggagaacaagcctgcttctttgctgagtcaagcaactgcgggctggctttcgtggacaataagtcatttgtggaccatctgttgcgggcccataaggcgacacgagatcaaattcaatatatatgttctcattgtcataggcagtttgagaaaatcgaaagcgttcgatcacatcataacatttgcaagcggaaggaagctgttgccccggacttagatgctaggctgccagtggaatgcgaagtggacgggtgttcacgccgctttacgactacgtccgggatgcggctgcacgtgaagaaagcacatccaattgaatatcacgcatctatacctcaatctaaaagaaatttgtggagcgaaggggagatgcggatgctggctcgtatggagctggacaatccgggactgacaaatgcgaggatgaacgaattgctgcatagtcttcatccttccaggtcagttgatgtcatcagacatatgcgcgggagaaacactcgatatagggaaatcatggaagagctcgtgttgattggcgttccagaggatagtgatagccaagccgaaaagacagcagaaccggagccagaaggaagaatcaatgaatgccagctggaagaactggtaaagacgcattcacaaattgatgacgcgcgataccaagccagtattgaatacgtacgtagggtacttcggtctgacgatccaggtgagttcttcaatgactggcttttcagttgcttccctggcaaggaaggccggcggattcagcgtcgaaaacgtgaacggctgcccccacgcaatgcaaaacagaagcgggccgcagaatttcgggtgctgcaggagctgtggcggaaagatcgttcaagacttgcaaccgtcatccttgataagatgccacctacggctaaagaaccgccgattggcgatatagaaaaggtgtatactaccaggttcgaacggcccagtccagaggaccaacatgagtttacgtccaagcctattgaggagcctatggagatggtacggtttatcacagttgaggaagttcttaagaatttaaaagccatgaagtctaacaacgcccccgggttggactctaacataacaatgaagcgtcttcggtccttgccgttgccctgccttcagctcgtctttaattgttggttggccatcggaaaggctccacagagtatgaaacaatgtcggagcaagctgcttcccaaaggggccgaaggtctggatgatgtaaataattggcgtcctttgaccataggctctctcttgatccggttatatacccggatccttgctatgcgcttacagtctaaagtccagctgcatcccagacaaaaggcctttcaacctttggacggatgcggagaaaatatcgcaatagtgtcatctttgctgcaagatgcgcacgaacgcaagaaagaattaaacatcatatttctggacatcgcgaaggcttttgattgcgtgtcacatcacagcattcaacgggcactgaatagatttggcttgccacgcgcttttcgacgtgtgatcgaagatctgtatgatggtgccacaacagtgtttcaaacatcagagggcgatagcaagacccttgggattagctctggagtaaaacaaggttgtcccttgtcccccgtccttttcaatatggtcatggacgaactcatcgctgacgcaccctctacggagtggggctatgagcttcacgacgaatccgtcgggctcctggcatttgctgacgacattgccctggtgagccattctagggcaatgatgtcacacgcgcttgattatgctgcaggcttcttcgaaaagagaaacttacaactgaacgccaggaagtgtattgggcttagtatcaagaaagctccccgccgaaaggttatgcggatcgaaatggggagtatctggagtctccgcaatgggtctgacaacattcccatcaaaatgctttctcccgccgacatggctcgctatcttggagccctgttttccccgtctgggaagcaaacaattgatctcgccactatgaagggctggattacgtccatagaaaagagcagactcaaaccgcaccaaaagttggtgatgctgcgaacgtaccttcttccgagggtactccatcacctcactattggagaaccaaacgcaactaccttgcgtcgggttgagagggaactgcgcaattcagtgaagcggtttctcaaattgcctgtggccactgccacacccttctttcatattagcacaaaagagggtggactcgagttaccacctttgctcgagaccatagcaaaacgaaaactgaagtgggaaataaggttacagaaatcaaaggattccttgattcgagccgtcgctgactctccaaaattccgtaaacaatttgacaaagctcgggcctggattggagtgccggtgattaatcgaccaagtgacatcaataggcgaatccgagagctgaataacggcaggtttgaaaggttcacgtctgagctggctgtccaatcccggtgtcatagggctctggccagcaatcccttgcgaaatgattggctgaccggacacaaccccgggctttacgcatcacaatttatagacgcattgaaacttgtcactagccaactgcccacccgcgaagcactgaatcggggaaacccccaggccgataaaaggtgtcggggctgtggattctccgtagagaatcaaaagcacgtcatcagtaattgtcccctggtccaacaagagcgtcatctgcgccataatcgtgtcgcccagctgtttgctcgttacgccaaagagaaaggatggaatattatagcagaacctcggatcaggaatcccagcggcgaaatcatgcgtccggacatcgttctgcggcgagatgataacgtagctatcgtagacatccaaatcccttatgaagacggcggtcgcgaacaattggctgaacgatatagacaaaagtgcagcaaatatcggcagttaagcacccacattcagcatgtgctgggagttaccaatcataccattggtgcgattattgttggtgcttgtggcacatggtgcgagcttaacaatcccatcttggattacataggagtcaatactacagccataaagaagaatctcagcattgaagctttgaggggcacactgaaaatattcggccaatttaagaatagggtgtttagaaatgagagagtgcatccatcacagcggccaagctccggcccaccagtaccagatatctctggcggcagcagcggcggctcaagcggaagtgaaacacctggaacttccgaaagcgctacgcctgaatcttctggtggatcttctggcggatcttccgccagcaatttcacacagttcgtccttgtagacaacggcggcaccggggatgttacagtggccccgagcaatttcgcaaacggcgtagccgagtggatctcctctaatagcagaagccaggcttataaggttacatgctctgtaaggcagtcttccgcacaaaatagaaagtacacaatcaaggtcgaagtgcccaaggttgctacacagaccgttggtggagaggagttgccagtggctgggtggcgctcctacctgaatatggagttaacaatccccattttcgctaccaattcagactgtgaactcattgtcaaagctatgcaaggtcttcttaaggatggtaacccaattccaagtgcaattgctgctaattcaggcatttatcctaagaagaaaagaaaggtgtga

SEQ ID NO: 1523 - DNA, 8160 bp, synthetic construct
  source 1..8160: mol_type = other DNA; note = FH-MCP-MG140-3-Cas9 Nickase
atggactacaaagacgatgacgacaagtacccctatgatgtacctgattatgctcctaagaagaaaagaaaggtggccagcaatttcacacagttcgtccttgtagacaacggcggcaccggggatgttacagtggccccgagcaatttcgcaaacggcgtagccgagtggatctcctctaatagcagaagccaggcttataaggttacatgctctgtaaggcagtcttccgcacaaaatagaaagtacacaatcaaggtcgaagtgcccaaggttgctacacagaccgttggtggagaggagttgccagtggctgggtggcgctcctacctgaatatggagttaacaatccccattttcgctaccaattcagactgtgaactcattgtcaaagctatgcaaggtcttcttaaggatggtaacccaattccaagtgcaattgctgctaattcaggcatttattctggcggcagcagcggcggctcaagcggaagtgaaacacctggaacttccgaaagcgctacgcctgaatcttctggtggatcttctggcggatcttccgcatgcgtcgactcacattctactgctgccgcttcttccggagccgcaactggccctatagtcataagataccctgtaaacaccactaatggcgggacgaccggagaacaagcctgcttctttgctgagtcaagcaactgcgggctggctttcgtggacaataagtcatttgtggaccatctgttgcgggcccataaggcgacacgagatcaaattcaatatatatgttctcattgtcataggcagtttgagaaaatcgaaagcgttcgatcacatcataacatttgcaagcggaaggaagctgttgccccggacttagatgctaggctgccagtggaatgcgaagtggacgggtgttcacgccgctttacgactacgtccgggatgcggctgcacgtgaagaaagcacatccaattgaatatcacgcatctatacctcaatctaaaagaaatttgtggagcgaaggggagatgcggatgctggctcgtatggagctggacaatccgggactgacaaatgcgaggatgaacgaattgctgcatagtcttcatccttccaggtcagttgatgtcatcagacatatgcgcgggagaaacactcgatatagggaaatcatggaagagctcgtgttgattggcgttccagaggatagtgatagccaagccgaaaagacagcagaaccggagccagaaggaagaatcaatgaatgccagctggaagaactggtaaagacgcattcacaaattgatgacgcgcgataccaagccagtattgaatacgtacgtagggtacttcggtctgacgatccaggtgagttcttcaatgactggcttttcagttgcttccctggcaaggaaggccggcggattcagcgtcgaaaacgtgaacggctgcccccacgcaatgcaaaacagaagcgggccgcagaatttcgggtgctgcaggagctgtggcggaaagatcgttcaagacttgcaaccgtcatccttgataagatgccacctacggctaaagaaccgccgattggcgatatagaaaaggtgtatactaccaggttcgaacggcccagtccagaggaccaacatgagtttacgtccaagcctattgaggagcctatggagatggtacggtttatcacagttgaggaagttcttaagaatttaaaagccatgaagtctaacaacgcccccgggttggactctaacataacaatgaagcgtcttcggtccttgccgttgccctgccttcagctcgtctttaattgttggttggccatcggaaaggctccacagagtatgaaacaatgtcggagcaagctgcttcccaaaggggccgaaggtctggatgatgtaaataattggcgtcctttgaccataggctctctcttgatccggttatatacccggatccttgctatgcgcttacagtctaaagtccagctgcatcccagacaaaaggcctttcaacctttggacggatgcggagaaaatatcgcaatagtgtcatctttgctgcaagatgcgcacgaacgcaagaaagaattaaacatcatatttctggacatcgcgaaggcttttgattgcgtgtcacatcacagcattcaacgggcactgaatagatttggcttgccacgcgcttttcgacgtgtgatcgaagatctgtatgatggtgccacaacagtgtttcaaacatcagagggcgatagcaagacccttgggattagctctggagtaaaacaaggttgtcccttgtcccccgtccttttcaatatggtcatggacgaactcatcgctgacgcaccctctacggagtggggctatgagcttcacgacgaatccgtcgggctcctggcatttgctgacgacattgccctggtgagccattctagggcaatgatgtcacacgcgcttgattatgctgcaggcttcttcgaaaagagaaacttacaactgaacgccaggaagtgtattgggcttagtatcaagaaagctccccgccgaaaggttatgcggatcgaaatggggagtatctggagtctccgcaatgggtctgacaacattcccatcaaaatgctttctcccgccgacatggctcgctatcttggagccctgttttccccgtctgggaagcaaacaattgatctcgccactatgaagggctggattacgtccatagaaaagagcagactcaaaccgcaccaaaagttggtgatgctgcgaacgtaccttcttccgagggtactccatcacctcactattggagaaccaaacgcaactaccttgcgtcgggttgagagggaactgcgcaattcagtgaagcggtttctcaaattgcctgtggccactgccacacccttctttcatattagcacaaaagagggtggactcgagttaccacctttgctcgagaccatagcaaaacgaaaactgaagtgggaaataaggttacagaaatcaaaggattccttgattcgagccgtcgctgactctccaaaattccgtaaacaatttgacaaagctcgggcctggattggagtgccggtgattaatcgaccaagtgacatcaataggcgaatccgagagctgaataacggcaggtttgaaaggttcacgtctgagctggctgtccaatcccggtgtcatagggctctggccagcaatcccttgcgaaatgattggctgaccggacacaaccccgggctttacgcatcacaatttatagacgcattgaaacttgtcactagccaactgcccacccgcgaagcactgaatcggggaaacccccaggccgataaaaggtgtcggggctgtggattctccgtagagaatcaaaagcacgtcatcagtaattgtcccctggtccaacaagagcgtcatctgcgccataatcgtgtcgcccagctgtttgctcgttacgccaaagagaaaggatggaatattatagcagaacctcggatcaggaatcccagcggcgaaatcatgcgtccggacatcgttctgcggcgagatgataacgtagctatcgtagacatccaaatcccttatgaagacggcggtcgcgaacaattggctgaacgatatagacaaaagtgcagcaaatatcggcagttaagcacccacattcagcatgtgctgggagttaccaatcataccattggtgcgattattgttggtgcttgtggcacatggtgcgagcttaacaatcccatcttggattacataggagtcaatactacagccataaagaagaatctcagcattgaagctttgaggggcacactgaaaatattcggccaatttaagaatagggtgtttagaaatgagagagtgcatccatcacagcggccaagctccggcccaccagtaccagatatctctggcggcagcagcggcggctcaagcggaagtgaaacacctggaacttccgaaagcgctacgcctgaatcttctggtggatcttctggcggatcttccgataagaaatatagtattgggttggatattggtacgaatagtgtaggatgggcggttattactgacgaatataaagtcccctctaagaagtttaaagtcctcggtaatacagataggcatagtattaagaagaatcttattggcgctctcttatttgattccggtgagactgctgaagctacaaggttaaagaggactgctcgccggcgctatacacgaaggaagaatcgcatatgttaccttcaggaaatatttagtaatgaaatggcaaaagtcgatgattcattcttccatcgacttgaggaatcatttctcgttgaggaagacaagaagcatgaaaggcatccaatctttggaaatatagtcgatgaagtagcttatcatgagaaatatccgactatttatcatttgcgaaagaagcttgtcgattctacagataaagcggatcttaggcttatatacctcgcactcgctcatatgattaaatttaggggtcattttctgattgaaggggatctcaatcctgataattccgatgtagataagctctttattcaacttgtacaaacatataatcaattatttgaagagaatcctattaatgcttctggagtcgatgcaaaagcgattttgagcgctcgcctttccaaaagtcgcagacttgagaacttgattgctcaactcccaggtgaaaagaagaacggactctttggtaatttgatcgcattgagtcttgggttgactccaaattttaaaagtaattttgatttggctgaagacgcaaagctccaattgtccaaagatacttatgatgatgatttggataatttattagcccaaattggagatcaatatgctgatctcttcctcgcagctaagaatctctcagatgcaattttgttgtctgatatacttcgcgtaaatactgaaattacaaaagctcctctctccgcaagcatgataaaacggtatgatgaacatcatcaagatcttactcttcttaaggccttagtacgccaacaacttccggagaaatataaggaaatcttctttgatcaatcaaagaatgggtatgcagggtatatagatggcggcgcgtcacaagaggaattttataaatttataaaaccgattcttgagaaaatggatggaacagaagagcttttggtcaaattaaatagggaagatttgttgaggaaacaaagaacctttgataatgggtctattccacatcaaatacatcttggcgaattgcacgcgatactcaggcgacaagaggacttctatccttttcttaaagataatcgcgagaaaattgaaaagattctcacgtttcggattccttattatgttggaccgttagcgcggggtaattcacggtttgcttggatgactaggaaatcagaagagactattacgccttggaattttgaagaggttgtcgataaaggagcctcagctcaatcttttattgaacgaatgactaattttgacaagaatctccctaatgaaaaggtcttgcctaaacatagtcttctctatgaatattttacagtctacaatgaattgacaaaggttaagtatgtcacagaaggtatgaggaaacctgcatttctgagtggggaacaaaagaaagcgattgtcgatctcctctttaaaacgaatagaaaggtcacggtaaaacaattaaaggaagattattttaagaagattgaatgttttgattcagtcgagatctctggggtcgaggacagatttaatgcaagcttgggtacctatcatgacttgctcaagatcattaaagataaagattttctcgataacgaagagaatgaagacatccttgaggacatagtccttactctcaccctcttcgaagatcgggaaatgattgaagagcgccttaagacatacgcacatctctttgatgataaggttatgaaacaactcaaacgccgacggtatacaggatggggaagacttagtcgcaaactcataaatggaataagggataaacaatcaggaaagaccattcttgactttcttaaatctgatggatttgcaaatcgcaatttcatgcaactcattcatgatgattccctcacattcaaggaagatatacaaaaggcacaagtcagtgggcaaggggactcccttcatgaacatatcgcaaaccttgctggttctcctgcaatcaagaagggaatactccaaactgtaaaagtcgtcgatgaacttgttaaggtaatgggacgccataaaccggaaaatattgtaatagagatggcgcgagaaaatcaaacgactcaaaagggccagaagaatagcagagaaaggatgaaacgcatagaggaagggataaaggaattggggtcccaaattttgaaggagcatccagtagagaatactcaattgcaaaatgagaaactctatctttattatctccaaaacggcagggacatgtatgtcgatcaagagttagatataaatcgccttagtgattatgacgtagatgcaattgtcccccaatccttccttaaagatgatagtattgataataaagtcttgactaggagtgataagaatcgcgggaaaagtgataatgtaccatctgaggaagtagtaaagaaaatgaagaattattggcgacaactcctcaatgcaaaattgatcacgcaacgaaaatttgataacttgacgaaagctgaacggggcggactctccgagcttgacaaagcagggtttattaaacgccaattggtcgagactagacaaattacgaaacatgttgctcaaattcttgatagcagaatgaataccaaatatgatgaaaacgataaattgattcgagaggtcaaggtaattacactcaaatcaaaattagtctctgactttaggaaagactttcaattctataaggtaagggaaattaataattatcatcatgcgcatgatgcatatttgaatgctgtggtcggcacagcgttgattaagaaatatcccaaattagagtcagaatttgtttatggagattataaagtctatgatgttaggaaaatgattgcaaagtctgagcaagagattgggaaagcgacagcaaaatatttcttttatagtaatattatgaacttctttaaaacggaaatcactctcgctaatggggaaattcgcaaaagaccccttattgaaactaatggtgagacaggcgaaattgtttgggacaaaggacgtgacttcgctacagtccgcaaggttctttctatgccacaggtaaacattgttaagaaaactgaagtccaaactggcggtttctccaaggaaagcattctccctaaacgcaatagtgacaaattgattgcaaggaagaaggattgggatccaaagaaatatggtgggtttgattcaccgacagttgcgtacagtgtccttgttgtagctaaggtagagaaaggaaaatccaagaagcttaaatcagttaaggaattattaggcattacaattatggagaggtccagttttgagaagaacccgatagatttcttagaggctaaagggtacaaagaggttaagaaagatcttattataaaacttccaaaatatagtctctttgaactggagaatggacgaaaacgaatgcttgcaagtgctggagagttacaaaagggcaatgagctcgctttaccaagcaagtacgtaaattttctctatcttgcatcccattacgaaaagttgaaaggtagtccagaagacaacgaacaaaagcaattattcgtagagcaacataaacattatcttgatgaaattattgaacagattagtgaattttcaaaacgcgttatactcgcagatgccaacttagataaggtactctctgcttataataaacatagggacaaacctatacgagaacaagcggaaaacattattcatttgttcacactcactaacctcggcgctccagctgcttttaaatatttcgatactacaatagatagaaaacgttatacttctacaaaggaagtcttagatgctacactcattcatcaaagtattacaggattatatgaaactcgtatagatctctcacaactcggcggggatcctaagaagaaaagaaaggtgtga

SEQ ID NO: 1524 - DNA, 7968 bp, synthetic construct
  source 1..7968: mol_type = other DNA; note = FH-Cas9 WT-MG140-8-MCP
atggactacaaagacgatgacgacaagtacccctatgatgtacctgattatgctcctaagaagaaaagaaaggtggataagaaatatagtattgggttggatattggtacgaatagtgtaggatgggcggttattactgacgaatataaagtcccctctaagaagtttaaagtcctcggtaatacagataggcatagtattaagaagaatcttattggcgctctcttatttgattccggtgagactgctgaagctacaaggttaaagaggactgctcgccggcgctatacacgaaggaagaatcgcatatgttaccttcaggaaatatttagtaatgaaatggcaaaagtcgatgattcattcttccatcgacttgaggaatcatttctcgttgaggaagacaagaagcatgaaaggcatccaatctttggaaatatagtcgatgaagtagcttatcatgagaaatatccgactatttatcatttgcgaaagaagcttgtcgattctacagataaagcggatcttaggcttatatacctcgcactcgctcatatgattaaatttaggggtcattttctgattgaaggggatctcaatcctgataattccgatgtagataagctctttattcaacttgtacaaacatataatcaattatttgaagagaatcctattaatgcttctggagtcgatgcaaaagcgattttgagcgctcgcctttccaaaagtcgcagacttgagaacttgattgctcaactcccaggtgaaaagaagaacggactctttggtaatttgatcgcattgagtcttgggttgactccaaattttaaaagtaattttgatttggctgaagacgcaaagctccaattgtccaaagatacttatgatgatgatttggataatttattagcccaaattggagatcaatatgctgatctcttcctcgcagctaagaatctctcagatgcaattttgttgtctgatatacttcgcgtaaatactgaaattacaaaagctcctctctccgcaagcatgataaaacggtatgatgaacatcatcaagatcttactcttcttaaggccttagtacgccaacaacttccggagaaatataaggaaatcttctttgatcaatcaaagaatgggtatgcagggtatatagatggcggcgcgtcacaagaggaattttataaatttataaaaccgattcttgagaaaatggatggaacagaagagcttttggtcaaattaaatagggaagatttgttgaggaaacaaagaacctttgataatgggtctattccacatcaaatacatcttggcgaattgcacgcgatactcaggcgacaagaggacttctatccttttcttaaagataatcgcgagaaaattgaaaagattctcacgtttcggattccttattatgttggaccgttagcgcggggtaattcacggtttgcttggatgactaggaaatcagaagagactattacgccttggaattttgaagaggttgtcgataaaggagcctcagctcaatcttttattgaacgaatgactaattttgacaagaatctccctaatgaaaaggtcttgcctaaacatagtcttctctatgaatattttacagtctacaatgaattgacaaaggttaagtatgtcacagaaggtatgaggaaacctgcatttctgagtggggaacaaaagaaagcgattgtcgatctcctctttaaaacgaatagaaaggtcacggtaaaacaattaaaggaagattattttaagaagattgaatgttttgattcagtcgagatctctggggtcgaggacagatttaatgcaagcttgggtacctatcatgacttgctcaagatcattaaagataaagattttctcgataacgaagagaatgaagacatccttgaggacatagtccttactctcaccctcttcgaagatcgggaaatgattgaagagcgccttaagacatacgcacatctctttgatgataaggttatgaaacaactcaaacgccgacggtatacaggatggggaagacttagtcgcaaactcataaatggaataagggataaacaatcaggaaagaccattcttgactttcttaaatctgatggatttgcaaatcgcaatttcatgcaactcattcatgatgattccctcacattcaaggaagatatacaaaaggcacaagtcagtgggcaaggggactcccttcatgaacatatcgcaaaccttgctggttctcctgcaatcaagaagggaatactccaaactgtaaaagtcgtcgatgaacttgttaaggtaatgggacgccataaaccggaaaatattgtaatagagatggcgcgagaaaatcaaacgactcaaaagggccagaagaatagcagagaaaggatgaaacgcatagaggaagggataaaggaattggggtcccaaattttgaaggagcatccagtagagaatactcaattgcaaaatgagaaactctatctttattatctccaaaacggcagggacatgtatgtcgatcaagagttagatataaatcgccttagtgattatgacgtagatcacattgtcccccaatccttccttaaagatgatagtattgataataaagtcttgactaggagtgataagaatcgcgggaaaagtgataatgtaccatctgaggaagtagtaaagaaaatgaagaattattggcgacaactcctcaatgcaaaattgatcacgcaacgaaaatttgataacttgacgaaagctgaacggggcggactctccgagcttgacaaagcagggtttattaaacgccaattggtcgagactagacaaattacgaaacatgttgctcaaattcttgatagcagaatgaataccaaatatgatgaaaacgataaattgattcgagaggtcaaggtaattacactcaaatcaaaattagtctctgactttaggaaagactttcaattctataaggtaagggaaattaataattatcatcatgcgcatgatgcatatttgaatgctgtggtcggcacagcgttgattaagaaatatcccaaattagagtcagaatttgtttatggagattataaagtctatgatgttaggaaaatgattgcaaagtctgagcaagagattgggaaagcgacagcaaaatatttcttttatagtaatattatgaacttctttaaaacggaaatcactctcgctaatggggaaattcgcaaaagaccccttattgaaactaatggtgagacaggcgaaattgtttgggacaaaggacgtgacttcgctacagtccgcaaggttctttctatgccacaggtaaacattgttaagaaaactgaagtccaaactggcggtttctccaaggaaagcattctccctaaacgcaatagtgacaaattgattgcaaggaagaaggattgggatccaaagaaatatggtgggtttgattcaccgacagttgcgtacagtgtccttgttgtagctaaggtagagaaaggaaaatccaagaagcttaaatcagttaaggaattattaggcattacaattatggagaggtccagttttgagaagaacccgatagatttcttagaggctaaagggtacaaagaggttaagaaagatcttattataaaacttccaaaatatagtctctttgaactggagaatggacgaaaacgaatgcttgcaagtgctggagagttacaaaagggcaatgagctcgctttaccaagcaagtacgtaaattttctctatcttgcatcccattacgaaaagttgaaaggtagtccagaagacaacgaacaaaagcaattattcgtagagcaacataaacattatcttgatgaaattattgaacagattagtgaattttcaaaacgcgttatactcgcagatgccaacttagataaggtactctctgcttataataaacatagggacaaacctatacgagaacaagcggaaaacattattcatttgttcacactcactaacctcggcgctccagctgcttttaaatatttcgatactacaatagatagaaaacgttatacttctacaaaggaagtcttagatgctacactcattcatcaaagtattacaggattatatgaaactcgtatagatctctcacaactcggcggggattctggcggcagcagcggcggctcaagcggaagtgaaacacctggaacttccgaaagcgctacgcctgaatcttctggtggatcttctggcggatcttccgcatgcgtcgactacccaaccagtgccgaagtgcctcaaccctgccccgtatgtctgagctctttgatagatcctaaacagattagagatcactttcggaagaagcatcatggcgtgcttatgcactggacctgccggaagtgcggcaggttttggccaaataacaaaagtgctgcatctcactataggtattgtattaaaagtcttccgagtctcgaggggcctagcaaatcacacaagtgcatcgaatgcggcggatccttttcaaccctggcaggccttcaactccacaggaaacggaagcaccctgaagcctacaatgagtctctcccccggcccactgggaagaatcggccatggggagatgacgagctgaagcggctggcggccgtggagctcgatagcggcggtacaaagcatattaacattaaatgccaaaagcatctccctcataggacaatcgaggcaatcgcatctattcgcaagactgatcgctatcgcattatcttaagggaaatccggtctagccgatctataagccgagagacccgcgaggaagcaactacgtcaacacctgacagcagcaacgtgctggaacggttaacatcccgaatcgcagagctgaagtctggagattacagcccatccgtcgaagccattctcgcttataccgaacgctgcctcgaggatcgcaatgcaagtagtggtctgagcctgctgccttctgagatgtatatgcccaaacccacttccgcttcaaagataaacagaggtatgcgcacgcccttccggcctcaaaatcgaacgcagagaagacgtcaacattatcaacaggtccaattgctgtacaaacgcgatcggaaacaggcagctggcgtgatcttggacggatccccgctgcacgtcgtgcaaccggacgtggagaaggtagatgaaatctttagatcaagattttcccgaccttctccaccggatgacgcagagttcatttccagtcctgccggtgtcttaaatatggattatataactgcaggagagattcaacaatgtagggacagcatgaagaagaataacgcacccggtccagaccgcaacattacaatggacgtcctcttggcactggaactcccagtcctggagctgttgtttaacacgtggttagcccttaaacaggtacctgctgcatttaagacggctaggacaatactgatacccaagagcggcgatacctcagacccgaataattggcggcccattacaatatgtagcctcatctcaagactctacgccaaactgttagcctcaagattgtccaaatgtgccaacttatcagaaagacagaaggcttttcgacctgtcgatggttgcggcgagaatacagccatcctttcagccgttatcgctcaagctcgtaaaaccaagagtcaactgcatgtagtgttcttagatctggcaaaagcttttgatactattccgcatacatctattgtccgggcgctgaaaaggaaagcattgcctggccattttattgacgtggttgagaacttgtataccgaagctacaacaagtatttctgttggtgggaagaatacttccagtatgccgttgacctctggggtcaaacaaggctgtcctctgagccctatccttttcaatctggtattggatgaacttatcacattaataggtgatgacaacggagttgacttgaatgacaagaagatcgccatacttgcctttgccgatgatctcgtcctgttaagccctaccacagacggcatggagaccaacctgaaactgtgtgagggattctttgataaaagatcaatgaagttgaacgccaggaagagtgtgagcctctccattgttagggctcacaaacggaagacaatgctcactgacgaacgtcctaagtggaaagttcatggagagtttcttcctactattaaacatactgaagaaatcaagtacttgggtgtccgttattctgcagcaggaaggagcattgctaagttccctaaactcgatcaatggctccaacggctgaagaaagccccacttaaaccacagcaacgcatacaaatggtcagatctacaattacttccaggctgattcatacgctccgattatcaagagtacacgctaaactcctgaaagacttggacaggaaaatccggtccttcgtcaaatcagtcctgcaccttccatccggaacaagtactgacttcttctacattcccgtgctcaaaggcggtctggggctgcaggaatttatgactctgattccagctgcaaagctgaagctcatcaacagtatgaagaagagctctgaccaagcagttattgccgcaatggaagtcgatcattggcttagagaggagcgctggtgccgtaaggtcactttgaatcaaggaaacaagaatgatgccgaacgcaggcgccttgcaaggtatataaacagcccacgaggcaaaagtcaagtggggttcgccaatttgccaggtcagtgccgttggttagagggcggggcaaaattaacgggccacgaatatattgtgggatgccacttaatgtcaaatacgctgccagttaggactcgcacttttcatggtgggcgcgacagagtggtcacctgcagatattgtccaggggtcctggaaacaccctcacacgcactccagagctgccccgtcgtgcgtaatgccgtaactaagcgccatgacctgatcttaactaaactccaacacttcctcactcctaactatgactcagtgattcgagaaccctggtttaatgggcgggaaggtaggatgaatcccgacttggtcctcaaacagggaaagatggtttatgtggttgatctgacaattccttacgacagttctcccgagttcattgactcacaagcccagcgaaaggtggcaaaatatgataccctcaagcccttgctgcaacagaagttccaagctgaaagagtagaggttataggcctggcattaggagcgcgcggcatgtacaccagcgccggtattcagacatgcttgaaactgggtctctctgatcgtcagcgacgatatatgggaatgatggccttgcgtttaacttgcgctgtgtggggaattttccggtctcaaccttctgggttgttcaacaaagtcccggacactggtactaccgatatctctggcggcagcagcggcggctcaagcggaagtgaaacacctggaacttccgaaagcgctacgcctgaatcttctggtggatcttctggcggatcttccgccagcaatttcacacagttcgtccttgtagacaacggcggcaccggggatgttacagtggccccgagcaatttcgcaaacggcgtagccgagtggatctcctctaatagcagaagccaggcttataaggttacatgctctgtaaggcagtcttccgcacaaaatagaaagtacacaatcaaggtcgaagtgcccaaggttgctacacagaccgttggtggagaggagttgccagtggctgggtggcgctcctacctgaatatggagttaacaatccccattttcgctaccaattcagactgtgaactcattgtcaaagctatgcaaggtcttcttaaggatggtaacccaattccaagtgcaattgctgctaattcaggcatttatcctaagaagaaaagaaaggtgtga

SEQ ID NO: 1525 - DNA, 7968 bp, synthetic construct
  source 1..7968: mol_type = other DNA; note = FH-MCP-MG140-8-Cas9 WT
atggactacaaagacgatgacgacaagtacccctatgatgtacctgattatgctcctaagaagaaaagaaaggtggccagcaatttcacacagttcgtccttgtagacaacggcggcaccggggatgttacagtggccccgagcaatttcgcaaacggcgtagccgagtggatctcctctaatagcagaagccaggcttataaggttacatgctctgtaaggcagtcttccgcacaaaatagaaagtacacaatcaaggtcgaagtgcccaaggttgctacacagaccgttggtggagaggagttgccagtggctgggtggcgctcctacctgaatatggagttaacaatccccattttcgctaccaattcagactgtgaactcattgtcaaagctatgcaaggtcttcttaaggatggtaacccaattccaagtgcaattgctgctaattcaggcatttattctggcggcagcagcggcggctcaagcggaagtgaaacacctggaacttccgaaagcgctacgcctgaatcttctggtggatcttctggcggatcttccgcatgcgtcgactacccaaccagtgccgaagtgcctcaaccctgccccgtatgtctgagctctttgatagatcctaaacagattagagatcactttcggaagaagcatcatggcgtgcttatgcactggacctgccggaagtgcggcaggttttggccaaataacaaaagtgctgcatctcactataggtattgtattaaaagtcttccgagtctcgaggggcctagcaaatcacacaagtgcatcgaatgcggcggatccttttcaaccctggcaggccttcaactccacaggaaacggaagcaccctgaagcctacaatgagtctctcccccggcccactgggaagaatcggccatggggagatgacgagctgaagcggctggcggccgtggagctcgatagcggcggtacaaagcatattaacattaaatgccaaaagcatctccctcataggacaatcgaggcaatcgcatctattcgcaagactgatcgctatcgcattatcttaagggaaatccggtctagccgatctataagccgagagacccgcgaggaagcaactacgtcaacacctgacagcagcaacgtgctggaacggttaacatcccgaatcgcagagctgaagtctggagattacagcccatccgtcgaagccattctcgcttataccgaacgctgcctcgaggatcgcaatgcaagtagtggtctgagcctgctgccttctgagatgtatatgcccaaacccacttccgcttcaaagataaacagaggtatgcgcacgcccttccggcctcaaaatcgaacgcagagaagacgtcaacattatcaacaggtccaattgctgtacaaacgcgatcggaaacaggcagctggcgtgatcttggacggatccccgctgcacgtcgtgcaaccggacgtggagaaggtagatgaaatctttagatcaagattttcccgaccttctccaccggatgacgcagagttcatttccagtcctgccggtgtcttaaatatggattatataactgcaggagagattcaacaatgtagggacagcatgaagaagaataacgcacccggtccagaccgcaacattacaatggacgtcctcttggcactggaactcccagtcctggagctgttgtttaacacgtggttagcccttaaacaggtacctgctgcatttaagacggctaggacaatactgatacccaagagcggcgatacctcagacccgaataattggcggcccattacaatatgtagcctcatctcaagactctacgccaaactgttagcctcaagattgtccaaatgtgccaacttatcagaaagacagaaggcttttcgacctgtcgatggttgcggcgagaatacagccatcctttcagccgttatcgctcaagctcgtaaaaccaagagtcaactgcatgtagtgttcttagatctggcaaaagcttttgatactattccgcatacatctattgtccgggcgctgaaaaggaaagcattgcctggccattttattgacgtggttgagaacttgtataccgaagctacaacaagtatttctgttggtgggaagaatacttccagtatgccgttgacctctggggtcaaacaaggctgtcctctgagccctatccttttcaatctggtattggatgaacttatcacattaataggtgatgacaacggagttgacttgaatgacaagaagatcgccatacttgcctttgccgatgatctcgtcctgttaagccctaccacagacggcatggagaccaacctgaaactgtgtgagggattctttgataaaagatcaatgaagttgaacgccaggaagagtgtgagcctctccattgttagggctcacaaacggaagacaatgctcactgacgaacgtcctaagtggaaagttcatggagagtttcttcctactattaaacatactgaagaaatcaagtacttgggtgtccgttattctgcagcaggaaggagcattgctaagttccctaaactcgatcaatggctccaacggctgaagaaagccccacttaaaccacagcaacgcatacaaatggtcagatctacaattacttccaggctgattcatacgctccgattatcaagagtacacgctaaactcctgaaagacttggacaggaaaatccggtccttcgtcaaatcagtcctgcaccttccatccggaacaagtactgacttcttctacattcccgtgctcaaaggcggtctggggctgcaggaatttatgactctgattccagctgcaaagctgaagctcatcaacagtatgaagaagagctctgaccaagcagttattgccgcaatggaagtcgatcattggcttagagaggagcgctggtgccgtaaggtcactttgaatcaaggaaacaagaatgatgccgaacgcaggcgccttgcaaggtatataaacagcccacgaggcaaaagtcaagtggggttcgccaatttgccaggtcagtgccgttggttagagggcggggcaaaattaacgggccacgaatatattgtgggatgccacttaatgtcaaatacgctgccagttaggactcgcacttttcatggtgggcgcgacagagtggtcacctgcagatattgtccaggggtcctggaaacaccctcacacgcactccagagctgccccgtcgtgcgtaatgccgtaactaagcgccatgacctgatcttaactaaactccaacacttcctcactcctaactatgactcagtgattcgagaaccctggtttaatgggcgggaaggtaggatgaatcccgacttggtcctcaaacagggaaagatggtttatgtggttgatctgacaattccttacgacagttctcccgagttcattgactcacaagcccagcgaaaggtggcaaaatatgataccctcaagcccttgctgcaacagaagttccaagctgaaagagtagaggttataggcctggcattaggagcgcgcggcatgtacaccagcgccggtattcagacatgcttgaaactgggtctctctgatcgtcagcgacgatatatgggaatgatggccttgcgtttaacttgcgctgtgtggggaattttccggtctcaaccttctgggttgttcaacaaagtcccggacactggtactaccgatatctctggcggcagcagcggcggctcaagcggaagtgaaacacctggaacttccgaaagcgctacgcctgaatcttctggtggatcttctggcggatcttccgataagaaatatagtattgggttggatattggtacgaatagtgtaggatgggcggttattactgacgaatataaagtcccctctaagaagtttaaagtcctcggtaatacagataggcatagtattaagaagaatcttattggcgctctcttatttgattccggtgagactgctgaagctacaaggttaaagaggactgctcgccggcgctatacacgaaggaagaatcgcatatgttaccttcaggaaatatttagtaatgaaatggcaaaagtcgatgattcattcttccatcgacttgaggaatcatttctcgttgaggaagacaagaagcatgaaaggcatccaatctttggaaatatagtcgatgaagtagcttatcatgagaaatatccgactatttatcatttgcgaaagaagcttgtcgattctacagataaagcggatcttaggcttatatacctcgcactcgctcatatgattaaatttaggggtcattttctgattgaaggggatctcaatcctgataattccgatgtagataagctctttattcaacttgtacaaacatataatcaattatttgaagagaatcctattaatgcttctggagtcgatgcaaaagcgattttgagcgctcgcctttccaaaagtcgcagacttgagaacttgattgctcaactcccaggtgaaaagaagaacggactctttggtaatttgatcgcattgagtcttgggttgactccaaattttaaaagtaattttgatttggctgaagacgcaaagctccaattgtccaaagatacttatgatgatgatttggataatttattagcccaaattggagatcaatatgctgatctcttcctcgcagctaagaatctctcagatgcaattttgttgtctgatatacttcgcgtaaatactgaaattacaaaagctcctctctccgcaagcatgataaaacggtatgatgaacatcatcaagatcttactcttcttaaggccttagtacgccaacaacttccggagaaatataaggaaatcttctttgatcaatcaaagaatgggtatgcagggtatatagatggcggcgcgtcacaagaggaattttataaatttataaaaccgattcttgagaaaatggatggaacagaagagcttttggtcaaattaaatagggaagatttgttgaggaaacaaagaacctttgataatgggtctattccacatcaaatacatcttggcgaattgcacgcgatactcaggcgacaagaggacttctatccttttcttaaagataatcgcgagaaaattgaaaagattctcacgtttcggattccttattatgttggaccgttagcgcggggtaattcacggtttgcttggatgactaggaaatcagaagagactattacgccttggaattttgaagaggttgtcgataaaggagcctcagctcaatcttttattgaacgaatgactaattttgacaagaatctccctaatgaaaaggtcttgcctaaacatagtcttctctatgaatattttacagtctacaatgaattgacaaaggttaagtatgtcacagaaggtatgaggaaacctgcatttctgagtggggaacaaaagaaagcgattgtcgatctcctctttaaaacgaatagaaaggtcacggtaaaacaattaaaggaagattattttaagaagattgaatgttttgattcagtcgagatctctggggtcgaggacagatttaatgcaagcttgggtacctatcatgacttgctcaagatcattaaagataaagattttctcgataacgaagagaatgaagacatccttgaggacatagtccttactctcaccctcttcgaagatcgggaaatgattgaagagcgccttaagacatacgcacatctctttgatgataaggttatgaaacaactcaaacgccgacggtatacaggatggggaagacttagtcgcaaactcataaatggaataagggataaacaatcaggaaagaccattcttgactttcttaaatctgatggatttgcaaatcgcaatttcatgcaactcattcatgatgattccctcacattcaaggaagatatacaaaaggcacaagtcagtgggcaaggggactcccttcatgaacatatcgcaaaccttgctggttctcctgcaatcaagaagggaatactccaaactgtaaaagtcgtcgatgaacttgttaaggtaatgggacgccataaaccggaaaatattgtaatagagatggcgcgagaaaatcaaacgactcaaaagggccagaagaatagcagagaaaggatgaaacgcatagaggaagggataaaggaattggggtcccaaattttgaaggagcatccagtagagaatactcaattgcaaaatgagaaactctatctttattatctccaaaacggcagggacatgtatgtcgatcaagagttagatataaatcgccttagtgattatgacgtagatcacattgtcccccaatccttccttaaagatgatagtattgataataaagtcttgactaggagtgataagaatcgcgggaaaagtgataatgtaccatctgaggaagtagtaaagaaaatgaagaattattggcgacaactcctcaatgcaaaattgatcacgcaacgaaaatttgataacttgacgaaagctgaacggggcggactctccgagcttgacaaagcagggtttattaaacgccaattggtcgagactagacaaattacgaaacatgttgctcaaattcttgatagcagaatgaataccaaatatgatgaaaacgataaattgattcgagaggtcaaggtaattacactcaaatcaaaattagtctctgactttaggaaagactttcaattctataaggtaagggaaattaataattatcatcatgcgcatgatgcatatttgaatgctgtggtcggcacagcgttgattaagaaatatcccaaattagagtcagaatttgtttatggagattataaagtctatgatgttaggaaaatgattgcaaagtctgagcaagagattgggaaagcgacagcaaaatatttcttttatagtaatattatgaacttctttaaaacggaaatcactctcgctaatggggaaattcgcaaaagaccccttattgaaactaatggtgagacaggcgaaattgtttgggacaaaggacgtgacttcgctacagtccgcaaggttctttctatgccacaggtaaacattgttaagaaaactgaagtccaaactggcggtttctccaaggaaagcattctccctaaacgcaatagtgacaaattgattgcaaggaagaaggattgggatccaaagaaatatggtgggtttgattcaccgacagttgcgtacagtgtccttgttgtagctaaggtagagaaaggaaaatccaagaagcttaaatcagttaaggaattattaggcattacaattatggagaggtccagttttgagaagaacccgatagatttcttagaggctaaagggtacaaagaggttaagaaagatcttattataaaacttccaaaatatagtctctttgaactggagaatggacgaaaacgaatgcttgcaagtgctggagagttacaaaagggcaatgagctcgctttaccaagcaagtacgtaaattttctctatcttgcatcccattacgaaaagttgaaaggtagtccagaagacaacgaacaaaagcaattattcgtagagcaacataaacattatcttgatgaaattattgaacagattagtgaattttcaaaacgcgttatactcgcagatgccaacttagataaggtactctctgcttataataaacatagggacaaacctatacgagaacaagcggaaaacattattcatttgttcacactcactaacctcggcgctccagctgcttttaaatatttcgatactacaatagatagaaaacgttatacttctacaaaggaagtcttagatgctacactcattcatcaaagtattacaggattatatgaaactcgtatagatctctcacaactcggcggggatcctaagaagaaaagaaaggtgtga

SEQ ID NO: 1526 - DNA, 7968 bp, synthetic construct
  source 1..7968: mol_type = other DNA; note = FH-Cas9 Nickase-MG140-8-MCP
atggactacaaagacgatgacgacaagtacccctatgatgtacctgattatgctcctaagaagaaaagaaaggtggataagaaatatagtattgggttggatattggtacgaatagtgtaggatgggcggttattactgacgaatataaagtcccctctaagaagtttaaagtcctcggtaatacagataggcatagtattaagaagaatcttattggcgctctcttatttgattccggtgagactgctgaagctacaaggttaaagaggactgctcgccggcgctatacacgaaggaagaatcgcatatgttaccttcaggaaatatttagtaatgaaatggcaaaagtcgatgattcattcttccatcgacttgaggaatcatttctcgttgaggaagacaagaagcatgaaaggcatccaatctttggaaatatagtcgatgaagtagcttatcatgagaaatatccgactatttatcatttgcgaaagaagcttgtcgattctacagataaagcggatcttaggcttatatacctcgcactcgctcatatgattaaatttaggggtcattttctgattgaaggggatctcaatcctgataattccgatgtagataagctctttattcaacttgtacaaacatataatcaattatttgaagagaatcctattaatgcttctggagtcgatgcaaaagcgattttgagcgctcgcctttccaaaagtcgcagacttgagaacttgattgctcaactcccaggtgaaaagaagaacggactctttggtaatttgatcgcattgagtcttgggttgactccaaattttaaaagtaattttgatttggctgaagacgcaaagctccaattgtccaaagatacttatgatgatgatttggataatttattagcccaaattggagatcaatatgctgatctcttcctcgcagctaagaatctctcagatgcaattttgttgtctgatatacttcgcgtaaatactgaaattacaaaagctcctctctccgcaagcatgataaaacggtatgatgaacatcatcaagatcttactcttcttaaggccttagtacgccaacaacttccggagaaatataaggaaatcttctttgatcaatcaaagaatgggtatgcagggtatatagatggcggcgcgtcacaagaggaattttataaatttataaaaccgattcttgagaaaatggatggaacagaagagcttttggtcaaattaaatagggaagatttgttgaggaaacaaagaacctttgataatgggtctattccacatcaaatacatcttggcgaattgcacgcgatactcaggcgacaagaggacttctatccttttcttaaagataatcgcgagaaaattgaaaagattctcacgtttcggattccttattatgttggaccgttagcgcggggtaattcacggtttgcttggatgactaggaaatcagaagagactattacgccttggaattttgaagaggttgtcgataaaggagcctcagctcaatcttttattgaacgaatgactaattttgacaagaatctccctaatgaaaaggtcttgcctaaacatagtcttctctatgaatattttacagtctacaatgaattgacaaaggttaagtatgtcacagaaggtatgaggaaacctgcatttctgagtggggaacaaaagaaagcgattgtcgatctcctctttaaaacgaatagaaaggtcacggtaaaacaattaaaggaagattattttaagaagattgaatgttttgattcagtcgagatctctggggtcgaggacagatttaatgcaagcttgggtacctatcatgacttgctcaagatcattaaagataaagattttctcgataacgaagagaatgaagacatccttgaggacatagtccttactctcaccctcttcgaagatcgggaaatgattgaagagcgccttaagacatacgcacatctctttgatgataaggttatgaaacaactcaaacgccgacggtatacaggatggggaagacttagtcgcaaactcataaatggaataagggataaacaatcaggaaagaccattcttgactttcttaaatctgatggatttgcaaatcgcaatttcatgcaactcattcatgatgattccctcacattcaaggaagatatacaaaaggcacaagtcagtgggcaaggggactcccttcatgaacatatcgcaaaccttgctggttctcctgcaatcaagaagggaatactccaaactgtaaaagtcgtcgatgaacttgttaaggtaatgggacgccataaaccggaaaatattgtaatagagatggcgcgagaaaatcaaacgactcaaaagggccagaagaatagcagagaaaggatgaaacgcatagaggaagggataaaggaattggggtcccaaattttgaaggagcatccagtagagaatactcaattgcaaaatgagaaactctatctttattatctccaaaacggcagggacatgtatgtcgatcaagagttagatataaatcgccttagtgattatgacgtagatgcaattgtcccccaatccttccttaaagatgatagtattgataataaagtcttgactaggagtgataagaatcgcgggaaaagtgataatgtaccatctgaggaagtagtaaagaaaatgaagaattattggcgacaactcctcaatgcaaaattgatcacgcaacgaaaatttgataacttgacgaaagctgaacggggcggactctccgagcttgacaaagcagggtttattaaacgccaattggtcgagactagacaaattacgaaacatgttgctcaaattcttgatagcagaatgaataccaaatatgatgaaaacgataaattgattcgagaggtcaaggtaattacactcaaatcaaaattagtctctgactttaggaaagactttcaattctataaggtaagggaaattaataattatcatcatgcgcatgatgcatatttgaatgctgtggtcggcacagcgttgattaagaaatatcccaaattagagtcagaatttgtttatggagattataaagtctatgatgttaggaaaatgattgcaaagtctgagcaagagattgggaaagcgacagcaaaatatttcttttatagtaatattatgaacttctttaaaacggaaatcactctcgctaatggggaaattcgcaaaagaccccttattgaaactaatggtgagacaggcgaaattgtttgggacaaaggacgtgacttcgctacagtccgcaaggttctttctatgccacaggtaaacattgttaagaaaactgaagtccaaactggcggtttctccaaggaaagcattctccctaaacgcaatagtgacaaattgattgcaaggaagaaggattgggatccaaagaaatatggtgggtttgattcaccgacagttgcgtacagtgtccttgttgtagctaaggtagagaaaggaaaatccaagaagcttaaatcagttaaggaattattaggcattacaattatggagaggtccagttttgagaagaacccgatagatttcttagaggctaaagggtacaaagaggttaagaaagatcttattataaaacttccaaaatatagtctctttgaactggagaatggacgaaaacgaatgcttgcaagtgctggagagttacaaaagggcaatgagctcgctttaccaagcaagtacgtaaattttctctatcttgcatcccattacgaaaagttgaaaggtagtccagaagacaacgaacaaaagcaattattcgtagagcaacataaacattatcttgatgaaattattgaacagattagtgaattttcaaaacgcgttatactcgcagatgccaacttagataaggtactctctgcttataataaacatagggacaaacctatacgagaacaagcggaaaacattattcatttgttcacactcactaacctcggcgctccagctgcttttaaatatttcgatactacaatagatagaaaacgttatacttctacaaaggaagtcttagatgctacactcattcatcaaagtattacaggattatatgaaactcgtatagatctctcacaactcggcggggattctggcggcagcagcggcggctcaagcggaagtgaaacacctggaacttccgaaagcgctacgcctgaatcttctggtggatcttctggcggatcttccgcatgcgtcgactacccaaccagtgccgaagtgcctcaaccctgccccgtatgtctgagctctttgatagatcctaaacagattagagatcactttcggaagaagcatcatggcgtgcttatgcactggacctgccggaagtgcggcaggttttggccaaataacaaaagtgctgcatctcactataggtattgtattaaaagtcttccgagtctcgaggggcctagcaaatcacacaagtgcatcgaatgcggcggatccttttcaaccctggcaggccttcaactccacaggaaacggaagcaccctgaagcctacaatgagtctctcccccggcccactgggaagaatcggccatggggagatgacgagctgaagcggctggcggccgtggagctcgatagcggcggtacaaagcatattaacattaaatgccaaaagcatctccctcataggacaatcgaggcaatcgcatctattcgcaagactgatcgctatcgcattatcttaagggaaatccggtctagccgatctataagccgagagacccgcgaggaagcaactacgtcaacacctgacagcagcaacgtgctggaacggttaacatcccgaatcgcagagctgaagtctggagattacagcccatccgtcgaagccattctcgcttataccgaacgctgcctcgaggatcgcaatgcaagtagtggtctgagcctgctgccttctgagatgtatatgcccaaacccacttccgcttcaaagataaacagaggtatgcgcacgcccttccggcctcaaaatcgaacgcagagaagacgtcaacattatcaacaggtccaattgctgtacaaacgcgatcggaaacaggcagctggcgtgatcttggacggatccccgctgcacgtcgtgcaaccggacgtggagaaggtagatgaaatctttagatcaagattttcccgaccttctccaccggatgacgcagagttcatttccagtcctgccggtgtcttaaatatggattatataactgcaggagagattcaacaatgtagggacagcatgaagaagaataacgcacccggtccagaccgcaacattacaatggacgtcctcttggcactggaactcccagtcctggagctgttgtttaacacgtggttagcccttaaacaggtacctgctgcatttaagacggctaggacaatactgatacccaagagcggcgatacctcagacccgaataattggcggcccattacaatatgtagcctcatctcaagactctacgccaaactgttagcctcaagattgtccaaatgtgccaacttatcagaaagacagaaggcttttcgacctgtcgatggttgcggcgagaatacagccatcctttcagccgttatcgctcaagctcgtaaaaccaagagtcaactgcatgtagtgttcttagatctggcaaaagcttttgatactattccgcatacatctattgtccgggcgctgaaaaggaaagcattgcctggccattttattgacgtggttgagaacttgtataccgaagctacaacaagtatttctgttggtgggaagaatacttccagtatgccgttgacctctggggtcaaacaaggctgtcctctgagccctatccttttcaatctggtattggatgaacttatcacattaataggtgatgacaacggagttgacttgaatgacaagaagatcgccatacttgcctttgccgatgatctcgtcctgttaagccctaccacagacggcatggagaccaacctgaaactgtgtgagggattctttgataaaagatcaatgaagttgaacgccaggaagagtgtgagcctctccattgttagggctcacaaacggaagacaatgctcactgacgaacgtcctaagtggaaagttcatggagagtttcttcctactattaaacatactgaagaaatcaagtacttgggtgtccgttattctgcagcaggaaggagcattgctaagttccctaaactcgatcaatggctccaacggctgaagaaagccccacttaaaccacagcaacgcatacaaatggtcagatctacaattacttccaggctgattcatacgctccgattatcaagagtacacgctaaactcctgaaagacttggacaggaaaatccggtccttcgtcaaatcagtcctgcaccttccatccggaacaagtactgacttcttctacattcccgtgctcaaaggcggtctggggctgcaggaatttatgactctgattccagctgcaaagctgaagctcatcaacagtatgaagaagagctctgaccaagcagttattgccgcaatggaagtcgatcattggcttagagaggagcgctggtgccgtaaggtcactttgaatcaaggaaacaagaatgatgccgaacgcaggcgccttgcaaggtatataaacagcccacgaggcaaaagtcaagtggggttcgccaatttgccaggtcagtgccgttggttagagggcggggcaaaattaacgggccacgaatatattgtgggatgccacttaatgtcaaatacgctgccagttaggactcgcacttttcatggtgggcgcgacagagtggtcacctgcagatattgtccaggggtcctggaaacaccctcacacgcactccagagctgccccgtcgtgcgtaatgccgtaactaagcgccatgacctgatcttaactaaactccaacacttcctcactcctaactatgactcagtgattcgagaaccctggtttaatgggcgggaaggtaggatgaatcccgacttggtcctcaaacagggaaagatggtttatgtggttgatctgacaattccttacgacagttctcccgagttcattgactcacaagcccagcgaaaggtggcaaaatatgataccctcaagcccttgctgcaacagaagttccaagctgaaagagtagaggttataggcctggcattaggagcgcgcggcatgtacaccagcgccggtattcagacatgcttgaaactgggtctctctgatcgtcagcgacgatatatgggaatgatggccttgcgtttaacttgcgctgtgtggggaattttccggtctcaaccttctgggttgttcaacaaagtcccggacactggtactaccgatatctctggcggcagcagcggcggctcaagcggaagtgaaacacctggaacttccgaaagcgctacgcctgaatcttctggtggatcttctggcggatcttccgccagcaatttcacacagttcgtccttgtagacaacggcggcaccggggatgttacagtggccccgagcaatttcgcaaacggcgtagccgagtggatctcctctaatagcagaagccaggcttataaggttacatgctctgtaaggcagtcttccgcacaaaatagaaagtacacaatcaaggtcgaagtgcccaaggttgctacacagaccgttggtggagaggagttgccagtggctgggtggcgctcctacctgaatatggagttaacaatccccattttcgctaccaattcagactgtgaactcattgtcaaagctatgcaaggtcttcttaaggatggtaacccaattccaagtgcaattgctgctaattcaggcatttatcctaagaagaaaagaaaggtgtga

SEQ ID NO: 1527 - DNA, 7968 bp, synthetic construct
  source 1..7968: mol_type = other DNA; note = FH-MCP-MG140-8-Cas9 Nickase
atggactacaaagacgatgacgacaagtacccctatgatgtacctgattatgctcctaagaagaaaagaaaggtggccagcaatttcacacagttcgtccttgtagacaacggcggcaccggggatgttacagtggccccgagcaatttcgcaaacggcgtagccgagtggatctcctctaatagcagaagccaggcttataaggttacatgctctgtaaggcagtcttccgcacaaaatagaaagtacacaatcaaggtcgaagtgcccaaggttgctacacagaccgttggtggagaggagttgccagtggctgggtggcgctcctacctgaatatggagttaacaatccccattttcgctaccaattcagactgtgaactcattgtcaaagctatgcaaggtcttcttaaggatggtaacccaattccaagtgcaattgctgctaattcaggcatttattctggcggcagcagcggcggctcaagcggaagtgaaacacctggaacttccgaaagcgctacgcctgaatcttctggtggatcttctggcggatcttccgcatgcgtcgactacccaaccagtgccgaagtgcctcaaccctgccccgtatgtctgagctctttgatagatcctaaacagattagagatcactttcggaagaagcatcatggcgtgcttatgcactggacctgccggaagtgcggcaggttttggccaaataacaaaagtgctgcatctcactataggtattgtattaaaagtcttccgagtctcgaggggcctagcaaatcacacaagtgcatcgaatgcggcggatccttttcaaccctggcaggccttcaactccacaggaaacggaagcaccctgaagcctacaatgagtctctcccccggcccactgggaagaatcggccatggggagatgacgagctgaagcggctggcggccgtggagctcgatagcggcggtacaaagcatattaacattaaatgccaaaagcatctccctcataggacaatcgaggcaatcgcatctattcgcaagactgatcgctatcgcattatcttaagggaaatccggtctagccgatctataagccgagagacccgcgaggaagcaactacgtcaacacctgacagcagcaacgtgctggaacggttaacatcccgaatcgcagagctgaagtctggagattacagcccatccgtcgaagccattctcgcttataccgaacgctgcctcgaggatcgcaatgcaagtagtggtctgagcctgctgccttctgagatgtatatgcccaaacccacttccgcttcaaagataaacagaggtatgcgcacgcccttccggcctcaaaatcgaacgcagagaagacgtcaacattatcaacaggtccaattgctgtacaaacgcgatcggaaacaggcagctggcgtgatcttggacggatccccgctgcacgtcgtgcaaccggacgtggagaaggtagatgaaatctttagatcaagattttcccgaccttctccaccggatgacgcagagttcatttccagtcctgccggtgtcttaaatatggattatataactgcaggagagattcaacaatgtagggacagcatgaagaagaataacgcacccggtccagaccgcaacattacaatggacgtcctcttggcactggaactcccagtcctggagctgttgtttaacacgtggttagcccttaaacaggtacctgctgcatttaagacggctaggacaatactgatacccaagagcggcgatacctcagacccgaataattggcggcccattacaatatgtagcctcatctcaagactctacgccaaactgttagcctcaagattgtccaaatgtgccaacttatcagaaagacagaaggcttttcgacctgtcgatggttgcggcgagaatacagccatcctttcagccgttatcgctcaagctcgtaaaaccaagagtcaactgcatgtagtgttcttagatctggcaaaagcttttgatactattccgcatacatctattgtccgggcgctgaaaaggaaagcattgcctggccattttattgacgtggttgagaacttgtataccgaagctacaacaagtatttctgttggtgggaagaatacttccagtatgccgttgacctctggggtcaaacaaggctgtcctctgagccctatccttttcaatctggtattggatgaacttatcacattaataggtgatgacaacggagttgacttgaatgacaagaagatcgccatacttgcctttgccgatgatctcgtcctgttaagccctaccacagacggcatggagaccaacctgaaactgtgtgagggattctttgataaaagatcaatgaagttgaacgccaggaagagtgtgagcctctccattgttagggctcacaaacggaagacaatgctcactgacgaacgtcctaagtggaaagttcatggagagtttcttcctactattaaacatactgaagaaatcaagtacttgggtgtccgttattctgcagcaggaaggagcattgctaagttccctaaactcgatcaatggctccaacggctgaagaaagccccacttaaaccacagcaacgcatacaaatggtcagatctacaattacttccaggctgattcatacgctccgattatcaagagtacacgctaaactcctgaaagacttggacaggaaaatccggtccttcgtcaaatcagtcctgcaccttccatccggaacaagtactgacttcttctacattcccgtgctcaaaggcggtctggggctgcaggaatttatgactctgattccagctgcaaagctgaagctcatcaacagtatgaagaagagctctgaccaagcagttattgccgcaatggaagtcgatcattggcttagagaggagcgctggtgccgtaaggtcactttgaatcaaggaaacaagaatgatgccgaacgcaggcgccttgcaaggtatataaacagcccacgaggcaaaagtcaagtggggttcgccaatttgccaggtcagtgccgttggttagagggcggggcaaaattaacgggccacgaatatattgtgggatgccacttaatgtcaaatacgctgccagttaggactcgcacttttcatggtgggcgcgacagagtggtcacctgcagatattgtccaggggtcctggaaacaccctcacacgcactccagagctgccccgtcgtgcgtaatgccgtaactaagcgccatgacctgatcttaactaaactccaacacttcctcactcctaactatgactcagtgattcgagaaccctggtttaatgggcgggaaggtaggatgaatcccgacttggtcctcaaacagggaaagatggtttatgtggttgatctgacaattccttacgacagttctcccgagttcattgactcacaagcccagcgaaaggtggcaaaatatgataccctcaagcccttgctgcaacagaagttccaagctgaaagagtagaggttataggcctggcattaggagcgcgcggcatgtacaccagcgccggtattcagacatgcttgaaactgggtctctctgatcgtcagcgacgatatatgggaatgatggccttgcgtttaacttgcgctgtgtggggaattttccggtctcaaccttctgggttgttcaacaaagtcccggacactggtactaccgatatctctggcggcagcagcggcggctcaagcggaagtgaaacacctggaacttccgaaagcgctacgcctgaatcttctggtggatcttctggcggatcttccgataagaaatatagtattgggttggatattggtacgaatagtgtaggatgggcggttattactgacgaatataaagtcccctctaagaagtttaaagtcctcggtaatacagataggcatagtattaagaagaatcttattggcgctctcttatttgattccggtgagactgctgaagctacaaggttaaagaggactgctcgccggcgctatacacgaaggaagaatcgcatatgttaccttcaggaaatatttagtaatgaaatggcaaaagtcgatgattcattcttccatcgacttgaggaatcatttctcgttgaggaagacaagaagcatgaaaggcatccaatctttggaaatatagtcgatgaagtagcttatcatgagaaatatccgactatttatcatttgcgaaagaagcttgtcgattctacagataaagcggatcttaggcttatatacctcgcactcgctcatatgattaaatttaggggtcattttctgattgaaggggatctcaatcctgataattccgatgtagataagctctttattcaacttgtacaaacatataatcaattatttgaagagaatcctattaatgcttctggagtcgatgcaaaagcgattttgagcgctcgcctttccaaaagtcgcagacttgagaacttgattgctcaactcccaggtgaaaagaagaacggactctttggtaatttgatcgcattgagtcttgggttgactccaaattttaaaagtaattttgatttggctgaagacgcaaagctccaattgtccaaagatacttatgatgatgatttggataatttattagcccaaattggagatcaatatgctgatctcttcctcgcagctaagaatctctcagatgcaattttgttgtctgatatacttcgcgtaaatactgaaattacaaaagctcctctctccgcaagcatgataaaacggtatgatgaacatcatcaagatcttactcttcttaaggccttagtacgccaacaacttccggagaaatataaggaaatcttctttgatcaatcaaagaatgggtatgcagggtatatagatggcggcgcgtcacaagaggaattttataaatttataaaaccgattcttgagaaaatggatggaacagaagagcttttggtcaaattaaatagggaagatttgttgaggaaacaaagaacctttgataatgggtctattccacatcaaatacatcttggcgaattgcacgcgatactcaggcgacaagaggacttctatccttttcttaaagataatcgcgagaaaattgaaaagattctcacgtttcggattccttattatgttggaccgttagcgcggggtaattcacggtttgcttggatgactaggaaatcagaagagactattacgccttggaattttgaagaggttgtcgataaaggagcctcagctcaatcttttattgaacgaatgactaattttgacaagaatctccctaatgaaaaggtcttgcctaaacatagtcttctctatgaatattttacagtctacaatgaattgacaaaggttaagtatgtcacagaaggtatgaggaaacctgcatttctgagtggggaacaaaagaaagcgattgtcgatctcctctttaaaacgaatagaaaggtcacggtaaaacaattaaaggaagattattttaagaagattgaatgttttgattcagtcgagatctctggggtcgaggacagatttaatgcaagcttgggtacctatcatgacttgctcaagatcattaaagataaagattttctcgataacgaagagaatgaagacatccttgaggacatagtccttactctcaccctcttcgaagatcgggaaatgattgaagagcgccttaagacatacgcacatctctttgatgataaggttatgaaacaactcaaacgccgacggtatacaggatggggaagacttagtcgcaaactcataaatggaataagggataaacaatcaggaaagaccattcttgactttcttaaatctgatggatttgcaaatcgcaatttcatgcaactcattcatgatgattccctcacattcaaggaagatatacaaaaggcacaagtcagtgggcaaggggactcccttcatgaacatatcgcaaaccttgctggttctcctgcaatcaagaagggaatactccaaactgtaaaagtcgtcgatgaacttgttaaggtaatgggacgccataaaccggaaaatattgtaatagagatggcgcgagaaaatcaaacgactcaaaagggccagaagaatagcagagaaaggatgaaacgcatagaggaagggataaaggaattggggtcccaaattttgaaggagcatccagtagagaatactcaattgcaaaatgagaaactctatctttattatctccaaaacggcagggacatgtatgtcgatcaagagttagatataaatcgccttagtgattatgacgtagatgcaattgtcccccaatccttccttaaagatgatagtattgataataaagtcttgactaggagtgataagaatcgcgggaaaagtgataatgtaccatctgaggaagtagtaaagaaaatgaagaattattggcgacaactcctcaatgcaaaattgatcacgcaacgaaaatttgataacttgacgaaagctgaacggggcggactctccgagcttgacaaagcagggtttattaaacgccaattggtcgagactagacaaattacgaaacatgttgctcaaattcttgatagcagaatgaataccaaatatgatgaaaacgataaattgattcgagaggtcaaggtaattacactcaaatcaaaattagtctctgactttaggaaagactttcaattctataaggtaagggaaattaataattatcatcatgcgcatgatgcatatttgaatgctgtggtcggcacagcgttgattaagaaatatcccaaattagagtcagaatttgtttatggagattataaagtctatgatgttaggaaaatgattgcaaagtctgagcaagagattgggaaagcgacagcaaaatatttcttttatagtaatattatgaacttctttaaaacggaaatcactctcgctaatggggaaattcgcaaaagaccccttattgaaactaatggtgagacaggcgaaattgtttgggacaaaggacgtgacttcgctacagtccgcaaggttctttctatgccacaggtaaacattgttaagaaaactgaagtccaaactggcggtttctccaaggaaagcattctccctaaacgcaatagtgacaaattgattgcaaggaagaaggattgggatccaaagaaatatggtgggtttgattcaccgacagttgcgtacagtgtccttgttgtagctaaggtagagaaaggaaaatccaagaagcttaaatcagttaaggaattattaggcattacaattatggagaggtccagttttgagaagaacccgatagatttcttagaggctaaagggtacaaagaggttaagaaagatcttattataaaacttccaaaatatagtctctttgaactggagaatggacgaaaacgaatgcttgcaagtgctggagagttacaaaagggcaatgagctcgctttaccaagcaagtacgtaaattttctctatcttgcatcccattacgaaaagttgaaaggtagtccagaagacaacgaacaaaagcaattattcgtagagcaacataaacattatcttgatgaaattattgaacagattagtgaattttcaaaacgcgttatactcgcagatgccaacttagataaggtactctctgcttataataaacatagggacaaacctatacgagaacaagcggaaaacattattcatttgttcacactcactaacctcggcgctccagctgcttttaaatatttcgatactacaatagatagaaaacgttatacttctacaaaggaagtcttagatgctacactcattcatcaaagtattacaggattatatgaaactcgtatagatctctcacaactcggcggggatcctaagaagaaaagaaaggtgtga

SEQ ID NO: 1528 - DNA, 6210 bp, synthetic construct
  source 1..6210: mol_type = other DNA; note = FH-Cas9 WT-MG153-18-MCP
atggactacaaagacgatgacgacaagtacccctatgatgtacctgattatgctcctaagaagaaaagaaaggtggataagaaatatagtattgggttggatattggtacgaatagtgtaggatgggcggttattactgacgaatataaagtcccctctaagaagtttaaagtcctcggtaatacagataggcatagtattaagaagaatcttattggcgctctcttatttgattccggtgagactgctgaagctacaaggttaaagaggactgctcgccggcgctatacacgaaggaagaatcgcatatgttaccttcaggaaatatttagtaatgaaatggcaaaagtcgatgattcattcttccatcgacttgaggaatcatttctcgttgaggaagacaagaagcatgaaaggcatccaatctttggaaatatagtcgatgaagtagcttatcatgagaaatatccgactatttatcatttgcgaaagaagcttgtcgattctacagataaagcggatcttaggcttatatacctcgcactcgctcatatgattaaatttaggggtcattttctgattgaaggggatctcaatcctgataattccgatgtagataagctctttattcaacttgtacaaacatataatcaattatttgaagagaatcctattaatgcttctggagtcgatgcaaaagcgattttgagcgctcgcctttccaaaagtcgcagacttgagaacttgattgctcaactcccaggtgaaaagaagaacggactctttggtaatttgatcgcattgagtcttgggttgactccaaattttaaaagtaattttgatttggctgaagacgcaaagctccaattgtccaaagatacttatgatgatgatttggataatttattagcccaaattggagatcaatatgctgatctcttcctcgcagctaagaatctctcagatgcaattttgttgtctgatatacttcgcgtaaatactgaaattacaaaagctcctctctccgcaagcatgataaaacggtatgatgaacatcatcaagatcttactcttcttaaggccttagtacgccaacaacttccggagaaatataaggaaatcttctttgatcaatcaaagaatgggtatgcagggtatatagatggcggcgcgtcacaagaggaattttataaatttataaaaccgattcttgagaaaatggatggaacagaagagcttttggtcaaattaaatagggaagatttgttgaggaaacaaagaacctttgataatgggtctattccacatcaaatacatcttggcgaattgcacgcgatactcaggcgacaagaggacttctatccttttcttaaagataatcgcgagaaaattgaaaagattctcacgtttcggattccttattatgttggaccgttagcgcggggtaattcacggtttgcttggatgactaggaaatcagaagagactattacgccttggaattttgaagaggttgtcgataaaggagcctcagctcaatcttttattgaacgaatgactaattttgacaagaatctccctaatgaaaaggtcttgcctaaacatagtcttctctatgaatattttacagtctacaatgaattgacaaaggttaagtatgtcacagaaggtatgaggaaacctgcatttctgagtggggaacaaaagaaagcgattgtcgatctcctctttaaaacgaatagaaaggtcacggtaaaacaattaaaggaagattattttaagaagattgaatgttttgattcagtcgagatctctggggtcgaggacagatttaatgcaagcttgggtacctatcatgacttgctcaagatcattaaagataaagattttctcgataacgaagagaatgaagacatccttgaggacatagtccttactctcaccctcttcgaagatcgggaaatgattgaagagcgccttaagacatacgcacatctctttgatgataaggttatgaaacaactcaaacgccgacggtatacaggatggggaagacttagtcgcaaactcataaatggaataagggataaacaatcaggaaagaccattcttgactttcttaaatctgatggatttgcaaatcgcaatttcatgcaactcattcatgatgattccctcacattcaaggaagatatacaaaaggcacaagtcagtgggcaaggggactcccttcatgaacatatcgcaaaccttgctggttctcctgcaatcaagaagggaatactccaaactgtaaaagtcgtcgatgaacttgttaaggtaatgggacgccataaaccggaaaatattgtaatagagatggcgcgagaaaatcaaacgactcaaaagggccagaagaatagcagagaaaggatgaaacgcatagaggaagggataaaggaattggggtcccaaattttgaaggagcatccagtagagaatactcaattgcaaaatgagaaactctatctttattatctccaaaacggcagggacatgtatgtcgatcaagagttagatataaatcgccttagtgattatgacgtagatcacattgtcccccaatccttccttaaagatgatagtattgataataaagtcttgactaggagtgataagaatcgcgggaaaagtgataatgtaccatctgaggaagtagtaaagaaaatgaagaattattggcgacaactcctcaatgcaaaattgatcacgcaacgaaaatttgataacttgacgaaagctgaacggggcggactctccgagcttgacaaagcagggtttattaaacgccaattggtcgagactagacaaattacgaaacatgttgctcaaattcttgatagcagaatgaataccaaatatgatgaaaacgataaattgattcgagaggtcaaggtaattacactcaaatcaaaattagtctctgactttaggaaagactttcaattctataaggtaagggaaattaataattatcatcatgcgcatgatgcatatttgaatgctgtggtcggcacagcgttgattaagaaatatcccaaattagagtcagaatttgtttatggagattataaagtctatgatgttaggaaaatgattgcaaagtctgagcaagagattgggaaagcgacagcaaaatatttcttttatagtaatattatgaacttctttaaaacggaaatcactctcgctaatggggaaattcgcaaaagaccccttattgaaactaatggtgagacaggcgaaattgtttgggacaaaggacgtgacttcgctacagtccgcaaggttctttctatgccacaggtaaacattgttaagaaaactgaagtccaaactggcggtttctccaaggaaagcattctccctaaacgcaatagtgacaaattgattgcaaggaagaaggattgggatccaaagaaatatggtgggtttgattcaccgacagttgcgtacagtgtccttgttgtagctaaggtagagaaaggaaaatccaagaagcttaaatcagttaaggaattattaggcattacaattatggagaggtccagttttgagaagaacccgatagatttcttagaggctaaagggtacaaagaggttaagaaagatcttattataaaacttccaaaatatagtctctttgaactggagaatggacgaaaacgaatgcttgcaagtgctggagagttacaaaagggcaatgagctcgctttaccaagcaagtacgtaaattttctctatcttgcatcccattacgaaaagttgaaaggtagtccagaagacaacgaacaaaagcaattattcgtagagcaacataaacattatcttgatgaaattattgaacagattagtgaattttcaaaacgcgttatactcgcagatgccaacttagataaggtactctctgcttataataaacatagggacaaacctatacgagaacaagcggaaaacattattcatttgttcacactcactaacctcggcgctccagctgcttttaaatatttcgatactacaatagatagaaaacgttatacttctacaaaggaagtcttagatgctacactcattcatcaaagtattacaggattatatgaaactcgtatagatctctcacaactcggcggggattctggcggcagcagcggcggctcaagcggaagtgaaacacctggaacttccgaaagcgctacgcctgaatcttctggtggatcttctggcggatcttccgcatgcgtcgacatgaggtcacaagagggaagacggcagcagaaagctcctgagggcgcgtacttgtgggaagagatggtgaagccatggggtactactggaggaccaagcccgtcttccgctcagggaggcgcgacccctcgcggggggcagggcagtggtttgatggagcaggtggttgagaggagcaacatgctggctgcgctgcgtcgggttgaaagaaatggaggcgcaccgggagtggacggcatacccaccgagaggctccgcgatcagattcgagccgagtggccaagaatcagggaagaacttcttgccggcacttaccgccctaaaccagttcgccgagtggaaatcccgaagcctggaggaggcaagagactgctgggtatccccacagcggtagaccgccttatccaacaagctctcctccaggtgctgactcctatctttgatcctcaatttagcgaagcctcttatggcttccgacccggcagacgggcccatgacgccgtgaggaaggccagacaatatgtcgaagagggttacgagtgggccgttgacttggatattgagaagtttttcgatcaggtgaaccatgacattttgatggcccgggtcgcgcgaaaggtgactgataagcgcgttctgactttgatccgcaggtatcttcaggcaggtgtcatggtcaacggcgtggttatcgagaccggggaaggcactcctcagggtggtcccttgagccccttactggcgaatatccttcttgatgaccttgacaaggagcttgaaaaacgggggcacaaattcgtgaggtacgcagacgactgtaatatatatgttaagagcaagcgcgctggggaacgagttatggctagtatcagaaaatttctgcaggaacggttgaagcttaaaattaacgagcagaagtctgccgtcgatcggccctggaagctgaaattcctgggtttctccatgcataaacgtaaaaccggtgaaattctcattcggcttgctccccaggctatagagcgtgttaaaggcaaaatccgggagattacagcacgaaacaagcctgtaagtatggccgagaggatcgaacgactgaatacatacttaggaggatggatcggttattttgcattggccgagacccccagcgtctttgaggagatcgaagggtggatgcgacgacggctccggatgtatttgtggaagcagtggaagcgggtccgtactcgctatcgcgaactcagagctcttggcttatctgaatgggtcgtgcaccagttcgctaacgcccgtaaaggtccctggcggatggcccacgggcctatgaatcgagccttaggcaacgcctattggcaaagccagggtcttatgtcactgaccgagcgataccagagcctgcgacaggctgatatctctggcggcagcagcggcggctcaagcggaagtgaaacacctggaacttccgaaagcgctacgcctgaatcttctggtggatcttctggcggatcttccgccagcaatttcacacagttcgtccttgtagacaacggcggcaccggggatgttacagtggccccgagcaatttcgcaaacggcgtagccgagtggatctcctctaatagcagaagccaggcttataaggttacatgctctgtaaggcagtcttccgcacaaaatagaaagtacacaatcaaggtcgaagtgcccaaggttgctacacagaccgttggtggagaggagttgccagtggctgggtggcgctcctacctgaatatggagttaacaatccccattttcgctaccaattcagactgtgaactcattgtcaaagctatgcaaggtcttcttaaggatggtaacccaattccaagtgcaattgctgctaattcaggcatttatcctaagaagaaaagaaaggtgtga

SEQ ID NO: 1529 - DNA, 6210 bp, synthetic construct
  source 1..6210: mol_type = other DNA; note = FH-MCP-MG153-18-Cas9 WT
atggactacaaagacgatgacgacaagtacccctatgatgtacctgattatgctcctaagaagaaaagaaaggtggccagcaatttcacacagttcgtccttgtagacaacggcggcaccggggatgttacagtggccccgagcaatttcgcaaacggcgtagccgagtggatctcctctaatagcagaagccaggcttataaggttacatgctctgtaaggcagtcttccgcacaaaatagaaagtacacaatcaaggtcgaagtgcccaaggttgctacacagaccgttggtggagaggagttgccagtggctgggtggcgctcctacctgaatatggagttaacaatccccattttcgctaccaattcagactgtgaactcattgtcaaagctatgcaaggtcttcttaaggatggtaacccaattccaagtgcaattgctgctaattcaggcatttattctggcggcagcagcggcggctcaagcggaagtgaaacacctggaacttccgaaagcgctacgcctgaatcttctggtggatcttctggcggatcttccgcatgcgtcgacatgaggtcacaagagggaagacggcagcagaaagctcctgagggcgcgtacttgtgggaagagatggtgaagccatggggtactactggaggaccaagcccgtcttccgctcagggaggcgcgacccctcgcggggggcagggcagtggtttgatggagcaggtggttgagaggagcaacatgctggctgcgctgcgtcgggttgaaagaaatggaggcgcaccgggagtggacggcatacccaccgagaggctccgcgatcagattcgagccgagtggccaagaatcagggaagaacttcttgccggcacttaccgccctaaaccagttcgccgagtggaaatcccgaagcctggaggaggcaagagactgctgggtatccccacagcggtagaccgccttatccaacaagctctcctccaggtgctgactcctatctttgatcctcaatttagcgaagcctcttatggcttccgacccggcagacgggcccatgacgccgtgaggaaggccagacaatatgtcgaagagggttacgagtgggccgttgacttggatattgagaagtttttcgatcaggtgaaccatgacattttgatggcccgggtcgcgcgaaaggtgactgataagcgcgttctgactttgatccgcaggtatcttcaggcaggtgtcatggtcaacggcgtggttatcgagaccggggaaggcactcctcagggtggtcccttgagccccttactggcgaatatccttcttgatgaccttgacaaggagcttgaaaaacgggggcacaaattcgtgaggtacgcagacgactgtaatatatatgttaagagcaagcgcgctggggaacgagttatggctagtatcagaaaatttctgcaggaacggttgaagcttaaaattaacgagcagaagtctgccgtcgatcggccctggaagctgaaattcctgggtttctccatgcataaacgtaaaaccggtgaaattctcattcggcttgctccccaggctatagagcgtgttaaaggcaaaatccgggagattacagcacgaaacaagcctgtaagtatggccgagaggatcgaacgactgaatacatacttaggaggatggatcggttattttgcattggccgagacccccagcgtctttgaggagatcgaagggtggatgcgacgacggctccggatgtatttgtggaagcagtggaagcgggtccgtactcgctatcgcgaactcagagctcttggcttatctgaatgggtcgtgcaccagttcgctaacgcccgtaaaggtccctggcggatggcccacgggcctatgaatcgagccttaggcaacgcctattggcaaagccagggtcttatgtcactgaccgagcgataccagagcctgcgacaggctgatatctctggcggcagcagcggcggctcaagcggaagtgaaacacctggaacttccgaaagcgctacgcctgaatcttctggtggatcttctggcggatcttccgataagaaatatagtattgggttggatattggtacgaatagtgtaggatgggcggttattactgacgaatataaagtcccctctaagaagtttaaagtcctcggtaatacagataggcatagtattaagaagaatcttattggcgctctcttatttgattccggtgagactgctgaagctacaaggttaaagaggactgctcgccggcgctatacacgaaggaagaatcgcatatgttaccttcaggaaatatttagtaatgaaatggcaaaagtcgatgattcattcttccatcgacttgaggaatcatttctcgttgaggaagacaagaagcatgaaaggcatccaatctttggaaatatagtcgatgaagtagcttatcatgagaaatatccgactatttatcatttgcgaaagaagcttgtcgattctacagataaagcggatcttaggcttatatacctcgcactcgctcatatgattaaatttaggggtcattttctgattgaaggggatctcaatcctgataattccgatgtagataagctctttattcaacttgtacaaacatataatcaattatttgaagagaatcctattaatgcttctggagtcgatgcaaaagcgattttgagcgctcgcctttccaaaagtcgcagacttgagaacttgattgctcaactcccaggtgaaaagaagaacggactctttggtaatttgatcgcattgagtcttgggttgactccaaattttaaaagtaattttgatttggctgaagacgcaaagctccaattgtccaaagatacttatgatgatgatttggataatttattagcccaaattggagatcaatatgctgatctcttcctcgcagctaagaatctctcagatgcaattttgttgtctgatatacttcgcgtaaatactgaaattacaaaagctcctctctccgcaagcatgataaaacggtatgatgaacatcatcaagatcttactcttcttaaggccttagtacgccaacaacttccggagaaatataaggaaatcttctttgatcaatcaaagaatgggtatgcagggtatatagatggcggcgcgtcacaagaggaattttataaatttataaaaccgattcttgagaaaatggatggaacagaagagcttttggtcaaattaaatagggaagatttgttgaggaaacaaagaacctttgataatgggtctattccacatcaaatacatcttggcgaattgcacgcgatactcaggcgacaagaggacttctatccttttcttaaagataatcgcgagaaaattgaaaagattctcacgtttcggattccttattatgttggaccgttagcgcggggtaattcacggtttgcttggatgactaggaaatcagaagagactattacgccttggaattttgaagaggttgtcgataaaggagcctcagctcaatcttttattgaacgaatgactaattttgacaagaatctccctaatgaaaaggtcttgcctaaacatagtcttctctatgaatattttacagtctacaatgaattgacaaaggttaagtatgtcacagaaggtatgaggaaacctgcatttctgagtggggaacaaaagaaagcgattgtcgatctcctctttaaaacgaatagaaaggtcacggtaaaacaattaaaggaagattattttaagaagattgaatgttttgattcagtcgagatctctggggtcgaggacagatttaatgcaagcttgggtacctatcatgacttgctcaagatcattaaagataaagattttctcgataacgaagagaatgaagacatccttgaggacatagtccttactctcaccctcttcgaagatcgggaaatgattgaagagcgccttaagacatacgcacatctctttgatgataaggttatgaaacaactcaaacgccgacggtatacaggatggggaagacttagtcgcaaactcataaatggaataagggataaacaatcaggaaagaccattcttgactttcttaaatctgatggatttgcaaatcgcaatttcatgcaactcattcatgatgattccctcacattcaaggaagatatacaaaaggcacaagtcagtgggcaaggggactcccttcatgaacatatcgcaaaccttgctggttctcctgcaatcaagaagggaatactccaaactgtaaaagtcgtcgatgaacttgttaaggtaatgggacgccataaaccggaaaatattgtaatagagatggcgcgagaaaatcaaacgactcaaaagggccagaagaatagcagagaaaggatgaaacgcatagaggaagggataaaggaattggggtcccaaattttgaaggagcatccagtagagaatactcaattgcaaaatgagaaactctatctttattatctccaaaacggcagggacatgtatgtcgatcaagagttagatataaatcgccttagtgattatgacgtagatcacattgtcccccaatccttccttaaagatgatagtattgataataaagtcttgactaggagtgataagaatcgcgggaaaagtgataatgtaccatctgaggaagtagtaaagaaaatgaagaattattggcgacaactcctcaatgcaaaattgatcacgcaacgaaaatttgataacttgacgaaagctgaacggggcggactctccgagcttgacaaagcagggtttattaaacgccaattggtcgagactagacaaattacgaaacatgttgctcaaattcttgatagcagaatgaataccaaatatgatgaaaacgataaattgattcgagaggtcaaggtaattacactcaaatcaaaattagtctctgactttaggaaagactttcaattctataaggtaagggaaattaataattatcatcatgcgcatgatgcatatttgaatgctgtggtcggcacagcgttgattaagaaatatcccaaattagagtcagaatttgtttatggagattataaagtctatgatgttaggaaaatgattgcaaagtctgagcaagagattgggaaagcgacagcaaaatatttcttttatagtaatattatgaacttctttaaaacggaaatcactctcgctaatggggaaattcgcaaaagaccccttattgaaactaatggtgagacaggcgaaattgtttgggacaaaggacgtgacttcgctacagtccgcaaggttctttctatgccacaggtaaacattgttaagaaaactgaagtccaaactggcggtttctccaaggaaagcattctccctaaacgcaatagtgacaaattgattgcaaggaagaaggattgggatccaaagaaatatggtgggtttgattcaccgacagttgcgtacagtgtccttgttgtagctaaggtagagaaaggaaaatccaagaagcttaaatcagttaaggaattattaggcattacaattatggagaggtccagttttgagaagaacccgatagatttcttagaggctaaagggtacaaagaggttaagaaagatcttattataaaacttccaaaatatagtctctttgaactggagaatggacgaaaacgaatgcttgcaagtgctggagagttacaaaagggcaatgagctcgctttaccaagcaagtacgtaaattttctctatcttgcatcccattacgaaaagttgaaaggtagtccagaagacaacgaacaaaagcaattattcgtagagcaacataaacattatcttgatgaaattattgaacagattagtgaattttcaaaacgcgttatactcgcagatgccaacttagataaggtactctctgcttataataaacatagggacaaacctatacgagaacaagcggaaaacattattcatttgttcacactcactaacctcggcgctccagctgcttttaaatatttcgatactacaatagatagaaaacgttatacttctacaaaggaagtcttagatgctacactcattcatcaaagtattacaggattatatgaaactcgtatagatctctcacaactcggcggggatcctaagaagaaaagaaaggtgtga

SEQ ID NO: 1530 - DNA, 6210 bp, synthetic construct
  source 1..6210: mol_type = other DNA; note = FH-Cas9 Nickase-MG153-18-MCP
atggactacaaagacgatgacgacaagtacccctatgatgtacctgattatgctcctaagaagaaaagaaaggtggataagaaatatagtattgggttggatattggtacgaatagtgtaggatgggcggttattactgacgaatataaagtcccctctaagaagtttaaagtcctcggtaatacagataggcatagtattaagaagaatcttattggcgctctcttatttgattccggtgagactgctgaagctacaaggttaaagaggactgctcgccggcgctatacacgaaggaagaatcgcatatgttaccttcaggaaatatttagtaatgaaatggcaaaagtcgatgattcattcttccatcgacttgaggaatcatttctcgttgaggaagacaagaagcatgaaaggcatccaatctttggaaatatagtcgatgaagtagcttatcatgagaaatatccgactatttatcatttgcgaaagaagcttgtcgattctacagataaagcggatcttaggcttatatacctcgcactcgctcatatgattaaatttaggggtcattttctgattgaaggggatctcaatcctgataattccgatgtagataagctctttattcaacttgtacaaacatataatcaattatttgaagagaatcctattaatgcttctggagtcgatgcaaaagcgattttgagcgctcgcctttccaaaagtcgcagacttgagaacttgattgctcaactcccaggtgaaaagaagaacggactctttggtaatttgatcgcattgagtcttgggttgactccaaattttaaaagtaattttgatttggctgaagacgcaaagctccaattgtccaaagatacttatgatgatgatttggataatttattagcccaaattggagatcaatatgctgatctcttcctcgcagctaagaatctctcagatgcaattttgttgtctgatatacttcgcgtaaatactgaaattacaaaagctcctctctccgcaagcatgataaaacggtatgatgaacatcatcaagatcttactcttcttaaggccttagtacgccaacaacttccggagaaatataaggaaatcttctttgatcaatcaaagaatgggtatgcagggtatatagatggcggcgcgtcacaagaggaattttataaatttataaaaccgattcttgagaaaatggatggaacagaagagcttttggtcaaattaaatagggaagatttgttgaggaaacaaagaacctttgataatgggtctattccacatcaaatacatcttggcgaattgcacgcgatactcaggcgacaagaggacttctatccttttcttaaagataatcgcgagaaaattgaaaagattctcacgtttcggattccttattatgttggaccgttagcgcggggtaattcacggtttgcttggatgactaggaaatcagaagagactattacgccttggaattttgaagaggttgtcgataaaggagcctcagctcaatcttttattgaacgaatgactaattttgacaagaatctccctaatgaaaaggtcttgcctaaacatagtcttctctatgaatattttacagtctacaatgaattgacaaaggttaagtatgtcacagaaggtatgaggaaacctgcatttctgagtggggaacaaaagaaagcgattgtcgatctcctctttaaaacgaatagaaaggtcacggtaaaacaattaaaggaagattattttaagaagattgaatgttttgattcagtcgagatctctggggtcgaggacagatttaatgcaagcttgggtacctatcatgacttgctcaagatcattaaagataaagattttctcgataacgaagagaatgaagacatccttgaggacatagtccttactctcaccctcttcgaagatcgggaaatgattgaagagcgccttaagacatacgcacatctctttgatgataaggttatgaaacaactcaaacgccgacggtatacaggatggggaagacttagtcgcaaactcataaatggaataagggataaacaatcaggaaagaccattcttgactttcttaaatctgatggatttgcaaatcgcaatttcatgcaactcattcatgatgattccctcacattcaaggaagatatacaaaaggcacaagtcagtgggcaaggggactcccttcatgaacatatcgcaaaccttgctggttctcctgcaatcaagaagggaatactccaaactgtaaaagtcgtcgatgaacttgttaaggtaatgggacgccataaaccggaaaatattgtaatagagatggcgcgagaaaatcaaacgactcaaaagggccagaagaatagcagagaaaggatgaaacgcatagaggaagggataaaggaattggggtcccaaattttgaaggagcatccagtagagaatactcaattgcaaaatgagaaactctatctttattatctccaaaacggcagggacatgtatgtcgatcaagagttagatataaatcgccttagtgattatgacgtagatgcaattgtcccccaatccttccttaaagatgatagtattgataataaagtcttgactaggagtgataagaatcgcgggaaaagtgataatgtaccatctgaggaagtagtaaagaaaatgaagaattattggcgacaactcctcaatgcaaaattgatcacgcaacgaaaatttgataacttgacgaaagctgaacggggcggactctccgagcttgacaaagcagggtttattaaacgccaattggtcgagactagacaaattacgaaacatgttgctcaaattcttgatagcagaatgaataccaaatatgatgaaaacgataaattgattcgagaggtcaaggtaattacactcaaatcaaaattagtctctgactttaggaaagactttcaattctataaggtaagggaaattaataattatcatcatgcgcatgatgcatatttgaatgctgtggtcggcacagcgttgattaagaaatatcccaaattagagtcagaatttgtttatggagattataaagtctatgatgttaggaaaatgattgcaaagtctgagcaagagattgggaaagcgacagcaaaatatttcttttatagtaatattatgaacttctttaaaacggaaatcactctcgctaatggggaaattcgcaaaagaccccttattgaaactaatggtgagacaggcgaaattgtttgggacaaaggacgtgacttcgctacagtccgcaaggttctttctatgccacaggtaaacattgttaagaaaactgaagtccaaactggcggtttctccaaggaaagcattctccctaaacgcaatagtgacaaattgattgcaaggaagaaggattgggatccaaagaaatatggtgggtttgattcaccgacagttgcgtacagtgtccttgttgtagctaaggtagagaaaggaaaatccaagaagcttaaatcagttaaggaattattaggcattacaattatggagaggtccagttttgagaagaacccgatagatttcttagaggctaaagggtacaaagaggttaagaaagatcttattataaaacttccaaaatatagtctctttgaactggagaatggacgaaaacgaatgcttgcaagtgctggagagttacaaaagggcaatgagctcgctttaccaagcaagtacgtaaattttctctatcttgcatcccattacgaaaagttgaaaggtagtccagaagacaacgaacaaaagcaattattcgtagagcaacataaacattatcttgatgaaattattgaacagattagtgaattttcaaaacgcgttatactcgcagatgccaacttagataaggtactctctgcttataataaacatagggacaaacctatacgagaacaagcggaaaacattattcatttgttcacactcactaacctcggcgctccagctgcttttaaatatttcgatactacaatagatagaaaacgttatacttctacaaaggaagtcttagatgctacactcattcatcaaagtattacaggattatatgaaactcgtatagatctctcacaactcggcggggattctggcggcagcagcggcggctcaagcggaagtgaaacacctggaacttccgaaagcgctacgcctgaatcttctggtggatcttctggcggatcttccgcatgcgtcgacatgaggtcacaagagggaagacggcagcagaaagctcctgagggcgcgtacttgtgggaagagatggtgaagccatggggtactactggaggaccaagcccgtcttccgctcagggaggcgcgacccctcgcggggggcagggcagtggtttgatggagcaggtggttgagaggagcaacatgctggctgcgctgcgtcgggttgaaagaaatggaggcgcaccgggagtggacggcatacccaccgagaggctccgcgatcagattcgagccgagtggccaagaatcagggaagaacttcttgccggcacttaccgccctaaaccagttcgccgagtggaaatcccgaagcctggaggaggcaagagactgctgggtatccccacagcggtagaccgccttatccaacaagctctcctccaggtgctgactcctatctttgatcctcaatttagcgaagcctcttatggcttccgacccggcagacgggcccatgacgccgtgaggaaggccagacaatatgtcgaagagggttacgagtgggccgttgacttggatattgagaagtttttcgatcaggtgaaccatgacattttgatggcccgggtcgcgcgaaaggtgactgataagcgcgttctgactttgatccgcaggtatcttcaggcaggtgtcatggtcaacggcgtggttatcgagaccggggaaggcactcctcagggtggtcccttgagccccttactggcgaatatccttcttgatgaccttgacaaggagcttgaaaaacgggggcacaaattcgtgaggtacgcagacgactgtaatatatatgttaagagcaagcgcgctggggaacgagttatggctagtatcagaaaatttctgcaggaacggttgaagcttaaaattaacgagcagaagtctgccgtcgatcggccctggaagctgaaattcctgggtttctccatgcataaacgtaaaaccggtgaaattctcattcggcttgctccccaggctatagagcgtgttaaaggcaaaatccgggagattacagcacgaaacaagcctgtaagtatggccgagaggatcgaacgactgaatacatacttaggaggatggatcggttattttgcattggccgagacccccagcgtctttgaggagatcgaagggtggatgcgacgacggctccggatgtatttgtggaagcagtggaagcgggtccgtactcgctatcgcgaactcagagctcttggcttatctgaatgggtcgtgcaccagttcgctaacgcccgtaaaggtccctggcggatggcccacgggcctatgaatcgagccttaggcaacgcctattggcaaagccagggtcttatgtcactgaccgagcgataccagagcctgcgacaggctgatatctctggcggcagcagcggcggctcaagcggaagtgaaacacctggaacttccgaaagcgctacgcctgaatcttctggtggatcttctggcggatcttccgccagcaatttcacacagttcgtccttgtagacaacggcggcaccggggatgttacagtggccccgagcaatttcgcaaacggcgtagccgagtggatctcctctaatagcagaagccaggcttataaggttacatgctctgtaaggcagtcttccgcacaaaatagaaagtacacaatcaaggtcgaagtgcccaaggttgctacacagaccgttggtggagaggagttgccagtggctgggtggcgctcctacctgaatatggagttaacaatccccattttcgctaccaattcagactgtgaactcattgtcaaagctatgcaaggtcttcttaaggatggtaacccaattccaagtgcaattgctgctaattcaggcatttatcctaagaagaaaagaaaggtgtga

SEQ ID NO: 1531 - DNA, 6210 bp, synthetic construct
  source 1..6210: mol_type = other DNA; note = FH-MCP-MG153-18-Cas9 Nickase
atggactacaaagacgatgacgacaagtacccctatgatgtacctgattatgctcctaagaagaaaagaaaggtggccagcaatttcacacagttcgtccttgtagacaacggcggcaccggggatgttacagtggccccgagcaatttcgcaaacggcgtagccgagtggatctcctctaatagcagaagccaggcttataaggttacatgctctgtaaggcagtcttccgcacaaaatagaaagtacacaatcaaggtcgaagtgcccaaggttgctacacagaccgttggtggagaggagttgccagtggctgggtggcgctcctacctgaatatggagttaacaatccccattttcgctaccaattcagactgtgaactcattgtcaaagctatgcaaggtcttcttaaggatggtaacccaattccaagtgcaattgctgctaattcaggcatttattctggcggcagcagcggcggctcaagcggaagtgaaacacctggaacttccgaaagcgctacgcctgaatcttctggtggatcttctggcggatcttccgcatgcgtcgacatgaggtcacaagagggaagacggcagcagaaagctcctgagggcgcgtacttgtgggaagagatggtgaagccatggggtactactggaggaccaagcccgtcttccgctcagggaggcgcgacccctcgcggggggcagggcagtggtttgatggagcaggtggttgagaggagcaacatgctggctgcgctgcgtcgggttgaaagaaatggaggcgcaccgggagtggacggcatacccaccgagaggctccgcgatcagattcgagccgagtggccaagaatcagggaagaacttcttgccggcacttaccgccctaaaccagttcgccgagtggaaatcccgaagcctggaggaggcaagagactgctgggtatccccacagcggtagaccgccttatccaacaagctctcctccaggtgctgactcctatctttgatcctcaatttagcgaagcctcttatggcttccgacccggcagacgggcccatgacgccgtgaggaaggccagacaatatgtcgaagagggttacgagtgggccgttgacttggatattgagaagtttttcgatcaggtgaaccatgacattttgatggcccgggtcgcgcgaaaggtgactgataagcgcgttctgactttgatccgcaggtatcttcaggcaggtgtcatggtcaacggcgtggttatcgagaccggggaaggcactcctcagggtggtcccttgagccccttactggcgaatatccttcttgatgaccttgacaaggagcttgaaaaacgggggcacaaattcgtgaggtacgcagacgactgtaatatatatgttaagagcaagcgcgctggggaacgagttatggctagtatcagaaaatttctgcaggaacggttgaagcttaaaattaacgagcagaagtctgccgtcgatcggccctggaagctgaaattcctgggtttctccatgcataaacgtaaaaccggtgaaattctcattcggcttgctccccaggctatagagcgtgttaaaggcaaaatccgggagattacagcacgaaacaagcctgtaagtatggccgagaggatcgaacgactgaatacatacttaggaggatggatcggttattttgcattggccgagacccccagcgtctttgaggagatcgaagggtggatgcgacgacggctccggatgtatttgtggaagcagtggaagcgggtccgtactcgctatcgcgaactcagagctcttggcttatctgaatgggtcgtgcaccagttcgctaacgcccgtaaaggtccctggcggatggcccacgggcctatgaatcgagccttaggcaacgcctattggcaaagccagggtcttatgtcactgaccgagcgataccagagcctgcgacaggctgatatctctggcggcagcagcggcggctcaagcggaagtgaaacacctggaacttccgaaagcgctacgcctgaatcttctggtggatcttctggcggatcttccgataagaaatatagtattgggttggatattggtacgaatagtgtaggatgggcggttattactgacgaatataaagtcccctctaagaagtttaaagtcctcggtaatacagataggcatagtattaagaagaatcttattggcgctctcttatttgattccggtgagactgctgaagctacaaggttaaagaggactgctcgccggcgctatacacgaaggaagaatcgcatatgttaccttcaggaaatatttagtaatgaaatggcaaaagtcgatgattcattcttccatcgacttgaggaatcatttctcgttgaggaagacaagaagcatgaaaggcatccaatctttggaaatatagtcgatgaagtagcttatcatgagaaatatccgactatttatcatttgcgaaagaagcttgtcgattctacagataaagcggatcttaggcttatatacctcgcactcgctcatatgattaaatttaggggtcattttctgattgaaggggatctcaatcctgataattccgatgtagataagctctttattcaacttgtacaaacatataatcaattatttgaagagaatcctattaatgcttctggagtcgatgcaaaagcgattttgagcgctcgcctttccaaaagtcgcagacttgagaacttgattgctcaactcccaggtgaaaagaagaacggactctttggtaatttgatcgcattgagtcttgggttgactccaaattttaaaagtaattttgatttggctgaagacgcaaagctccaattgtccaaagatacttatgatgatgatttggataatttattagcccaaattggagatcaatatgctgatctcttcctcgcagctaagaatctctcagatgcaattttgttgtctgatatacttcgcgtaaatactgaaattacaaaagctcctctctccgcaagcatgataaaacggtatgatgaacatcatcaagatcttactcttcttaaggccttagtacgccaacaacttccggagaaatataaggaaatcttctttgatcaatcaaagaatgggtatgcagggtatatagatggcggcgcgtcacaagaggaattttataaatttataaaaccgattcttgagaaaatggatggaacagaagagcttttggtcaaattaaatagggaagatttgttgaggaaacaaagaacctttgataatgggtctattccacatcaaatacatcttggcgaattgcacgcgatactcaggcgacaagaggacttctatccttttcttaaagataatcgcgagaaaattgaaaagattctcacgtttcggattccttattatgttggaccgttagcgcggggtaattcacggtttgcttggatgactaggaaatcagaagagactattacgccttggaattttgaagaggttgtcgataaaggagcctcagctcaatcttttattgaacgaatgactaattttgacaagaatctccctaatgaaaaggtcttgcctaaacatagtcttctctatgaatattttacagtctacaatgaattgacaaaggttaagtatgtcacagaaggtatgaggaaacctgcatttctgagtggggaacaaaagaaagcgattgtcgatctcctctttaaaacgaatagaaaggtcacggtaaaacaattaaaggaagattattttaagaagattgaatgttttgattcagtcgagatctctggggtcgaggacagatttaatgcaagcttgggtacctatcatgacttgctcaagatcattaaagataaagattttctcgataacgaagagaatgaagacatccttgaggacatagtccttactctcaccctcttcgaagatcgggaaatgattgaagagcgccttaagacatacgcacatctctttgatgataaggttatgaaacaactcaaacgccgacggtatacaggatggggaagacttagtcgcaaactcataaatggaataagggataaacaatcaggaaagaccattcttgactttcttaaatctgatggatttgcaaatcgcaatttcatgcaactcattcatgatgattccctcacattcaaggaagatatacaaaaggcacaagtcagtgggcaaggggactcccttcatgaacatatcgcaaaccttgctggttctcctgcaatcaagaagggaatactccaaactgtaaaagtcgtcgatgaacttgttaaggtaatgggacgccataaaccggaaaatattgtaatagagatggcgcgagaaaatcaaacgactcaaaagggccagaagaatagcagagaaaggatgaaacgcatagaggaagggataaaggaattggggtcccaaattttgaaggagcatccagtagagaatactcaattgcaaaatgagaaactctatctttattatctccaaaacggcagggacatgtatgtcgatcaagagttagatataaatcgccttagtgattatgacgtagatgcaattgtcccccaatccttccttaaagatgatagtattgataataaagtcttgactaggagtgataagaatcgcgggaaaagtgataatgtaccatctgaggaagtagtaaagaaaatgaagaattattggcgacaactcctcaatgcaaaattgatcacgcaacgaaaatttgataacttgacgaaagctgaacggggcggactctccgagcttgacaaagcagggtttattaaacgccaattggtcgagactagacaaattacgaaacatgttgctcaaattcttgatagcagaatgaataccaaatatgatgaaaacgataaattgattcgagaggtcaaggtaattacactcaaatcaaaattagtctctgactttaggaaagactttcaattctataaggtaagggaaattaataattatcatcatgcgcatgatgcatatttgaatgctgtggtcggcacagcgttgattaagaaatatcccaaattagagtcagaatttgtttatggagattataaagtctatgatgttaggaaaatgattgcaaagtctgagcaagagattgggaaagcgacagcaaaatatttcttttatagtaatattatgaacttctttaaaacggaaatcactctcgctaatggggaaattcgcaaaagaccccttattgaaactaatggtgagacaggcgaaattgtttgggacaaaggacgtgacttcgctacagtccgcaaggttctttctatgccacaggtaaacattgttaagaaaactgaagtccaaactggcggtttctccaaggaaagcattctccctaaacgcaatagtgacaaattgattgcaaggaagaaggattgggatccaaagaaatatggtgggtttgattcaccgacagttgcgtacagtgtccttgttgtagctaaggtagagaaaggaaaatccaagaagcttaaatcagttaaggaattattaggcattacaattatggagaggtccagttttgagaagaacccgatagatttcttagaggctaaagggtacaaagaggttaagaaagatcttattataaaacttccaaaatatagtctctttgaactggagaatggacgaaaacgaatgcttgcaagtgctggagagttacaaaagggcaatgagctcgctttaccaagcaagtacgtaaattttctctatcttgcatcccattacgaaaagttgaaaggtagtccagaagacaacgaacaaaagcaattattcgtagagcaacataaacattatcttgatgaaattattgaacagattagtgaattttcaaaacgcgttatactcgcagatgccaacttagataaggtactctctgcttataataaacatagggacaaacctatacgagaacaagcggaaaacattattcatttgttcacactcactaacctcggcgctccagctgcttttaaatatttcgatactacaatagatagaaaacgttatacttctacaaaggaagtcttagatgctacactcattcatcaaagtattacaggattatatgaaactcgtatagatctctcacaactcggcggggatcctaagaagaaaagaaaggtgtga

SEQ ID NO: 1532 - RNA, 1272 nt, synthetic construct
  source 1..1272: mol_type = other RNA; note = Cargo1_homology_MS2_g4
cgctaccggtctaatacgactcactataaggtaagatacattgatgagtttggacaaaccacaactagaatgcagtgaaaaaaatgctttatttgtgaaatttgtgatgctattgctttatttgtaaccattataagctgcaataaacaagttctacttgtacagctcgtccatgccgccggtggagtggcggccctcggcgcgttcgtactgttccacgatggtgtagtcctcgttgtgggaggtgatgtccaacttgatgttgacgttgtaggcgccgggcagctgcacgggcttcttggccttgtaggtggtcttgacctcagcgtcgtagtggccgccgtccttcagcttcagcctctgcttgatctcgcccttcagggcgccgtcctcggggtacatccgctcggaggaggcctcccagcccatggtcttcttctgcattacggggccgtcggaggggaagttggtgccgcgcagcttcaccttgtagatgaactcgccgtcctgcagggaggagtcctgggtcacggtcaccacgccgccgtcctcgaagttcatcacgcgctcccacttgaagccctcggggaaggacagcttcaagtagtcggggatgtcggcggggtgcttcacgtaggccttggagccgtacatgaactgaggggacaggatgtcccaggcgaagggcagggggccacccttggtcaccttcagcttggcggtctgggtgccctcgtaggggcggccctcgccctcgccctcgatctcgaactcgtggccgttcacggagccctccatgtgcaccttgaagcgcatgaactccttgatgatggccatgttatcctcctcgcccttgctcaccatggtggcctgtgttctggcggcaaacccgttgcgaaaaagaacgttcacggcgactactgcacttatatacggttctcccccaccctcgggaaaaaggcggagccagtacacgacatcactttcccagtttaccccgcgccaccttctctaggcaccggatcaattgccgacccctccccccaacttctcggggactgtgggcgatgtgcgctctgcccctttcaccattttagagctaggccaacatgaggattacccatgtctgcagggcctagcaagttaaaataaggctagtccgttatcaacttggccaggactgaggattacccagtctatctgcagggccaagtaaaaaaaaaaggaagggaaaagggaaaaaaaaaaggaaacttctacacagccatcggt

SEQ ID NO: 1533 - RNA, 1272 nt, synthetic construct
  source 1..1272: mol_type = other RNA; note = Cargo2_MS2_homology_g4
cgctaccggtctaatacgactcactataaggtaagatacattgatgagtttggacaaaccacaactagaatgcagtgaaaaaaatgctttatttgtgaaatttgtgatgctattgctttatttgtaaccattataagctgcaataaacaagttctacttgtacagctcgtccatgccgccggtggagtggcggccctcggcgcgttcgtactgttccacgatggtgtagtcctcgttgtgggaggtgatgtccaacttgatgttgacgttgtaggcgccgggcagctgcacgggcttcttggccttgtaggtggtcttgacctcagcgtcgtagtggccgccgtccttcagcttcagcctctgcttgatctcgcccttcagggcgccgtcctcggggtacatccgctcggaggaggcctcccagcccatggtcttcttctgcattacggggccgtcggaggggaagttggtgccgcgcagcttcaccttgtagatgaactcgccgtcctgcagggaggagtcctgggtcacggtcaccacgccgccgtcctcgaagttcatcacgcgctcccacttgaagccctcggggaaggacagcttcaagtagtcggggatgtcggcggggtgcttcacgtaggccttggagccgtacatgaactgaggggacaggatgtcccaggcgaagggcagggggccacccttggtcaccttcagcttggcggtctgggtgccctcgtaggggcggccctcgccctcgccctcgatctcgaactcgtggccgttcacggagccctccatgtgcaccttgaagcgcatgaactccttgatgatggccatgttatcctcctcgcccttgctcaccatggtggcctgtgttctggcggcaaacccgttgcgaaaaagaacgttcacggcgactactgcacttatatacggttctcccccaccctcgggaaaaaggcggagccagtacacgacatcactttcccagtttaccccgcgccaccttctctaggcaccggatcaattgccgacccctccccccaacttctcggggactgtgggcgatgtgcgctctgccctttagagctaggccaacatgaggattacccatgtctgcagggcctagcaagttaaaataaggctagtccgttatcaacttggccaggactgaggattacccagtctatctgcagggccaagtctttcaccataaaaaaaaaaggaagggaaaagggaaaaaaaaaaggaaacttctacacagccatcggt

SEQ ID NO: 1534 - RNA, 1150 nt, synthetic construct
  source 1..1150: mol_type = other RNA; note = Cargo3_homology_g4
cgctaccggtctaatacgactcactataaggtaagatacattgatgagtttggacaaaccacaactagaatgcagtgaaaaaaatgctttatttgtgaaatttgtgatgctattgctttatttgtaaccattataagctgcaataaacaagttctacttgtacagctcgtccatgccgccggtggagtggcggccctcggcgcgttcgtactgttccacgatggtgtagtcctcgttgtgggaggtgatgtccaacttgatgttgacgttgtaggcgccgggcagctgcacgggcttcttggccttgtaggtggtcttgacctcagcgtcgtagtggccgccgtccttcagcttcagcctctgcttgatctcgcccttcagggcgccgtcctcggggtacatccgctcggaggaggcctcccagcccatggtcttcttctgcattacggggccgtcggaggggaagttggtgccgcgcagcttcaccttgtagatgaactcgccgtcctgcagggaggagtcctgggtcacggtcaccacgccgccgtcctcgaagttcatcacgcgctcccacttgaagccctcggggaaggacagcttcaagtagtcggggatgtcggcggggtgcttcacgtaggccttggagccgtacatgaactgaggggacaggatgtcccaggcgaagggcagggggccacccttggtcaccttcagcttggcggtctgggtgccctcgtaggggcggccctcgccctcgccctcgatctcgaactcgtggccgttcacggagccctccatgtgcaccttgaagcgcatgaactccttgatgatggccatgttatcctcctcgcccttgctcaccatggtggcctgtgttctggcggcaaacccgttgcgaaaaagaacgttcacggcgactactgcacttatatacggttctcccccaccctcgggaaaaaggcggagccagtacacgacatcactttcccagtttaccccgcgccaccttctctaggcaccggatcaattgccgacccctccccccaacttctcggggactgtgggcgatgtgcgctctgcccctttcaccataaaaaaaaaaggaagggaaaagggaaaaaaaaaaggaaacttctacacagccatcggt

SEQ ID NO: 1535 - RNA, 2456 nt, synthetic construct
  source 1..2456: mol_type = other RNA; note = Cargo4_140-3_5' and 3' UTR_homology_g4
cgctaccggtctaatacgactcactataaggcgaggtgtccctatccaccatcgggtttcagaaatcttccgaggacaacgtccgagtgctggctgtctggtctgtatgacttgggccaatcggtaaccgatagccgatcctccctgagggcaccacgttgcagccggtaactacagcggtctacctgttgtccatggcaatgggggaatggttgtaggctaactgtcccgggagcggcgatatcctacggtatgtgtcaggatctcgtcgaaggtagagaacatcctaccgaagcctgaatgaagggtaagttttgacttcctgacaggcggccttgacaggattcgcaccgaatcctcgaaaggtaagctgctgcgtccataacgcccgtggagcacagtcatactcggtgcgagctcatagttaacagtaatgatctcgtgtcgtcagccgcagaggggaatcacccgcggtaaccgaggggaactacgatccgtcgccattcctcgaggcccgaatgacctcagcgccacctgctaagggcaaccaaagctggtggcaatgagatgacgggaacaaataataagacctgctgttaacaggcaaggtgctagcctccatccaggctaaccctcaatcctgaagtgaaagggcggcaatcctttcatggaaggaggccctctaccgcgttcaaccgacggctaagggcagctaggcaaaatcactgagaccaaccagtcactatgattgagccggcaggggggcgggatcctgagtaccacgagttatcgggaccgtcctgagggattttccaaagcatcggggaaactctagcaatagttaacactattgatagagtcaaccgtagcacttaatagagacgactcgtggtcgccgggggccttcggtgggtacggacaccgactagccctcgcaggatgtggtcagtccacgtgaagtggaaccaactggccatgtctaagtggaaaggcaaacccttgccggggcgagctaagtacacaaccgatttcatccgggcgccgtacagcccgactcattcgtacatgataagtagggattcgttagtttcggtccatgcgtctggttttgggaacgtttttccggaaaaaacaccaggcgattacgataagatacattgatgagtttggacaaaccacaactagaatgcagtgaaaaaaatgctttatttgtgaaatttgtgatgctattgctttatttgtaaccattataagctgcaataaacaagttctacttgtacagctcgtccatgccgccggtggagtggcggccctcggcgcgttcgtactgttccacgatggtgtagtcctcgttgtgggaggtgatgtccaacttgatgttgacgttgtaggcgccgggcagctgcacgggcttcttggccttgtaggtggtcttgacctcagcgtcgtagtggccgccgtccttcagcttcagcctctgcttgatctcgcccttcagggcgccgtcctcggggtacatccgctcggaggaggcctcccagcccatggtcttcttctgcattacggggccgtcggaggggaagttggtgccgcgcagcttcaccttgtagatgaactcgccgtcctgcagggaggagtcctgggtcacggtcaccacgccgccgtcctcgaagttcatcacgcgctcccacttgaagccctcggggaaggacagcttcaagtagtcggggatgtcggcggggtgcttcacgtaggccttggagccgtacatgaactgaggggacaggatgtcccaggcgaagggcagggggccacccttggtcaccttcagcttggcggtctgggtgccctcgtaggggcggccctcgccctcgccctcgatctcgaactcgtggccgttcacggagccctccatgtgcaccttgaagcgcatgaactccttgatgatggccatgttatcctcctcgcccttgctcaccatggtggcctgtgttctggcggcaaacccgttgcgaaaaagaacgttcacggcgactactgcacttatatacggttctcccccaccctcgggaaaaaggcggagccagtacacgacatcactttcccagtttaccccgcgccaccttctctaggcaccggatcaattgccgacccctccccccaacttctcggggactgtgggcgatgtgcgctctgcccactagataattatttggtaactcttttatactttgttttgttaacaatagtttaaatttttcttttcagtctactaacctacttacaatagtattccttatatctgctgctgttaactgttatactgttgctgacattgaacaatggatcacttttgcttaaggtgaccattggtctttggaattgaatctttcaccataaaaaaaaaaggaagggaaaagggaaaaaaaaaaggaaacttctacacagccatcggt

SEQ ID NO: 1536 - RNA, 2267 nt, synthetic construct
  source 1..2267: mol_type = other RNA; note = Cargo5_140-3_5' UTR_homology_g4
cgctaccggtctaatacgactcactataaggcgaggtgtccctatccaccatcgggtttcagaaatcttccgaggacaacgtccgagtgctggctgtctggtctgtatgacttgggccaatcggtaaccgatagccgatcctccctgagggcaccacgttgcagccggtaactacagcggtctacctgttgtccatggcaatgggggaatggttgtaggctaactgtcccgggagcggcgatatcctacggtatgtgtcaggatctcgtcgaaggtagagaacatcctaccgaagcctgaatgaagggtaagttttgacttcctgacaggcggccttgacaggattcgcaccgaatcctcgaaaggtaagctgctgcgtccataacgcccgtggagcacagtcatactcggtgcgagctcatagttaacagtaatgatctcgtgtcgtcagccgcagaggggaatcacccgcggtaaccgaggggaactacgatccgtcgccattcctcgaggcccgaatgacctcagcgccacctgctaagggcaaccaaagctggtggcaatgagatgacgggaacaaataataagacctgctgttaacaggcaaggtgctagcctccatccaggctaaccctcaatcctgaagtgaaagggcggcaatcctttcatggaaggaggccctctaccgcgttcaaccgacggctaagggcagctaggcaaaatcactgagaccaaccagtcactatgattgagccggcaggggggcgggatcctgagtaccacgagttatcgggaccgtcctgagggattttccaaagcatcggggaaactctagcaatagttaacactattgatagagtcaaccgtagcacttaatagagacgactcgtggtcgccgggggccttcggtgggtacggacaccgactagccctcgcaggatgtggtcagtccacgtgaagtggaaccaactggccatgtctaagtggaaaggcaaacccttgccggggcgagctaagtacacaaccgatttcatccgggcgccgtacagcccgactcattcgtacatgataagtagggattcgttagtttcggtccatgcgtctggttttgggaacgtttttccggaaaaaacaccaggcgattacgataagatacattgatgagtttggacaaaccacaactagaatgcagtgaaaaaaatgctttatttgtgaaatttgtgatgctattgctttatttgtaaccattataagctgcaataaacaagttctacttgtacagctcgtccatgccgccggtggagtggcggccctcggcgcgttcgtactgttccacgatggtgtagtcctcgttgtgggaggtgatgtccaacttgatgttgacgttgtaggcgccgggcagctgcacgggcttcttggccttgtaggtggtcttgacctcagcgtcgtagtggccgccgtccttcagcttcagcctctgcttgatctcgcccttcagggcgccgtcctcggggtacatccgctcggaggaggcctcccagcccatggtcttcttctgcattacggggccgtcggaggggaagttggtgccgcgcagcttcaccttgtagatgaactcgccgtcctgcagggaggagtcctgggtcacggtcaccacgccgccgtcctcgaagttcatcacgcgctcccacttgaagccctcggggaaggacagcttcaagtagtcggggatgtcggcggggtgcttcacgtaggccttggagccgtacatgaactgaggggacaggatgtcccaggcgaagggcagggggccacccttggtcaccttcagcttggcggtctgggtgccctcgtaggggcggccctcgccctcgccctcgatctcgaactcgtggccgttcacggagccctccatgtgcaccttgaagcgcatgaactccttgatgatggccatgttatcctcctcgcccttgctcaccatggtggcctgtgttctggcggcaaacccgttgcgaaaaagaacgttcacggcgactactgcacttatatacggttctcccccaccctcgggaaaaaggcggagccagtacacgacatcactttcccagtttaccccgcgccaccttctctaggcaccggatcaattgccgacccctccccccaacttctcggggactgtgggcgatgtgcgctctgcccctttcaccataaaaaaaaaaggaagggaaaagggaaaaaaaaaaggaaacttctacacagccatcggt

SEQ ID NO: 1537 - RNA, 1339 nt, synthetic construct
  source 1..1339: mol_type = other RNA; note = Cargo6_140-3_3' UTR_homology_g4
cgctaccggtctaatacgactcactataaggtaagatacattgatgagtttggacaaaccacaactagaatgcagtgaaaaaaatgctttatttgtgaaatttgtgatgctattgctttatttgtaaccattataagctgcaataaacaagttctacttgtacagctcgtccatgccgccggtggagtggcggccctcggcgcgttcgtactgttccacgatggtgtagtcctcgttgtgggaggtgatgtccaacttgatgttgacgttgtaggcgccgggcagctgcacgggcttcttggccttgtaggtggtcttgacctcagcgtcgtagtggccgccgtccttcagcttcagcctctgcttgatctcgcccttcagggcgccgtcctcggggtacatccgctcggaggaggcctcccagcccatggtcttcttctgcattacggggccgtcggaggggaagttggtgccgcgcagcttcaccttgtagatgaactcgccgtcctgcagggaggagtcctgggtcacggtcaccacgccgccgtcctcgaagttcatcacgcgctcccacttgaagccctcggggaaggacagcttcaagtagtcggggatgtcggcggggtgcttcacgtaggccttggagccgtacatgaactgaggggacaggatgtcccaggcgaagggcagggggccacccttggtcaccttcagcttggcggtctgggtgccctcgtaggggcggccctcgccctcgccctcgatctcgaactcgtggccgttcacggagccctccatgtgcaccttgaagcgcatgaactccttgatgatggccatgttatcctcctcgcccttgctcaccatggtggcctgtgttctggcggcaaacccgttgcgaaaaagaacgttcacggcgactactgcacttatatacggttctcccccaccctcgggaaaaaggcggagccagtacacgacatcactttcccagtttaccccgcgccaccttctctaggcaccggatcaattgccgacccctccccccaacttctcggggactgtgggcgatgtgcgctctgcccactagataattatttggtaactcttttatactttgttttgttaacaatagtttaaatttttcttttcagtctactaacctacttacaatagtattccttatatctgctgctgttaactgttatactgttgctgacattgaacaatggatcacttttgcttaaggtgaccattggtctttggaattgaatctttcaccataaaaaaaaaaggaagggaaaagggaaaaaaaaaaggaaacttctacacagccatcggt

SEQ ID NO: 1538 - RNA, 1804 nt, synthetic construct
  source 1..1804: mol_type = other RNA; note = Cargo4_140-8_5' and 3' UTR_homology_g4
cgctaccggtctaatacgactcactataaggggcggagtaaggagccgtgttccgacgttgtgaaggctccacaaattagcccgtggcaaactccgcggtaggcagggctccgtgaagggcggtggaggatctccgtgggaggatttatccaaagatggagaccaccgtctgacacgttgaataggcctaaatctaccccagaccacctcctcgttggtgcaaccggtaactgcactcggtgcaggctgacggtcggggatagtcgtagagggaagcaatcgaaacctctatgttccttcagattcgcccgcggcagtgcccacgcttgggctagttaaactgctgccctgctaaggtagagcaggtgaatactctcccgggacctgtgggttgactcccccttgccccgttcctatgtgtcacagaaacaaatagatcgcaatctgcaaccgaggaaaatcttagccttggaacagatacagaggaccacgcgaccgtaggggtgtaagatacattgatgagtttggacaaaccacaactagaatgcagtgaaaaaaatgctttatttgtgaaatttgtgatgctattgctttatttgtaaccattataagctgcaataaacaagttctacttgtacagctcgtccatgccgccggtggagtggcggccctcggcgcgttcgtactgttccacgatggtgtagtcctcgttgtgggaggtgatgtccaacttgatgttgacgttgtaggcgccgggcagctgcacgggcttcttggccttgtaggtggtcttgacctcagcgtcgtagtggccgccgtccttcagcttcagcctctgcttgatctcgcccttcagggcgccgtcctcggggtacatccgctcggaggaggcctcccagcccatggtcttcttctgcattacggggccgtcggaggggaagttggtgccgcgcagcttcaccttgtagatgaactcgccgtcctgcagggaggagtcctgggtcacggtcaccacgccgccgtcctcgaagttcatcacgcgctcccacttgaagccctcggggaaggacagcttcaagtagtcggggatgtcggcggggtgcttcacgtaggccttggagccgtacatgaactgaggggacaggatgtcccaggcgaagggcagggggccacccttggtcaccttcagcttggcggtctgggtgccctcgtaggggcggccctcgccctcgccctcgatctcgaactcgtggccgttcacggagccctccatgtgcaccttgaagcgcatgaactccttgatgatggccatgttatcctcctcgcccttgctcaccatggtggcctgtgttctggcggcaaacccgttgcgaaaaagaacgttcacggcgactactgcacttatatacggttctcccccaccctcgggaaaaaggcggagccagtacacgacatcactttcccagtttaccccgcgccaccttctctaggcaccggatcaattgccgacccctccccccaacttctcggggactgtgggcgatgtgcgctctgcccgaagaaaagaacggaaccgccacgtggaaacagggagaatggacatttcacctaatgacttctgacaggagaacgatgccgatgagatgaccacagcccgaaagtcgcagacgtaaaaggaatcagaagacgataccttccactctctatcctagcgcggatagatgagaaatagtaatctttcaccataaaaaaaaaaggaagggaaaagggaaaaaaaaaaggaaacttctacacagccatcggt

SEQ ID NO: 1539 - RNA, 1625 nt, synthetic construct
  source 1..1625: mol_type = other RNA; note = Cargo5_140-8_5' UTR_homology_g4
cgctaccggtctaatacgactcactataaggggcggagtaaggagccgtgttccgacgttgtgaaggctccacaaattagcccgtggcaaactccgcggtaggcagggctccgtgaagggcggtggaggatctccgtgggaggatttatccaaagatggagaccaccgtctgacacgttgaataggcctaaatctaccccagaccacctcctcgttggtgcaaccggtaactgcactcggtgcaggctgacggtcggggatagtcgtagagggaagcaatcgaaacctctatgttccttcagattcgcccgcggcagtgcccacgcttgggctagttaaactgctgccctgctaaggtagagcaggtgaatactctcccgggacctgtgggttgactcccccttgccccgttcctatgtgtcacagaaacaaatagatcgcaatctgcaaccgaggaaaatcttagccttggaacagatacagaggaccacgcgaccgtaggggtgtaagatacattgatgagtttggacaaaccacaactagaatgcagtgaaaaaaatgctttatttgtgaaatttgtgatgctattgctttatttgtaaccattataagctgcaataaacaagttctacttgtacagctcgtccatgccgccggtggagtggcggccctcggcgcgttcgtactgttccacgatggtgtagtcctcgttgtgggaggtgatgtccaacttgatgttgacgttgtaggcgccgggcagctgcacgggcttcttggccttgtaggtggtcttgacctcagcgtcgtagtggccgccgtccttcagcttcagcctctgcttgatctcgcccttcagggcgccgtcctcggggtacatccgctcggaggaggcctcccagcccatggtcttcttctgcattacggggccgtcggaggggaagttggtgccgcgcagcttcaccttgtagatgaactcgccgtcctgcagggaggagtcctgggtcacggtcaccacgccgccgtcctcgaagttcatcacgcgctcccacttgaagccctcggggaaggacagcttcaagtagtcggggatgtcggcggggtgcttcacgtaggccttggagccgtacatgaactgaggggacaggatgtcccaggcgaagggcagggggccacccttggtcaccttcagcttggcggtctgggtgccctcgtaggggcggccctcgccctcgccctcgatctcgaactcgtggccgttcacggagccctccatgtgcaccttgaagcgcatgaactccttgatgatggccatgttatcctcctcgcccttgctcaccatggtggcctgtgttctggcggcaaacccgttgcgaaaaagaacgttcacggcgactactgcacttatatacggttctcccccaccctcgggaaaaaggcggagccagtacacgacatcactttcccagtttaccccgcgccaccttctctaggcaccggatcaattgccgacccctccccccaacttctcggggactgtgggcgatgtgcgctctgcccctttcaccataaaaaaaaaaggaagggaaaagggaaaaaaaaaaggaaacttctacacagccatcggt

SEQ ID NO: 1540 - RNA, 1329 nt, synthetic construct
  source 1..1329: mol_type = other RNA; note = Cargo6_140-8_3' UTR_homology_g4
cgctaccggtctaatacgactcactataaggtaagatacattgatgagtttggacaaaccacaactagaatgcagtgaaaaaaatgctttatttgtgaaatttgtgatgctattgctttatttgtaaccattataagctgcaataaacaagttctacttgtacagctcgtccatgccgccggtggagtggcggccctcggcgcgttcgtactgttccacgatggtgtagtcctcgttgtgggaggtgatgtccaacttgatgttgacgttgtaggcgccgggcagctgcacgggcttcttggccttgtaggtggtcttgacctcagcgtcgtagtggccgccgtccttcagcttcagcctctgcttgatctcgcccttcagggcgccgtcctcggggtacatccgctcggaggaggcctcccagcccatggtcttcttctgcattacggggccgtcggaggggaagttggtgccgcgcagcttcaccttgtagatgaactcgccgtcctgcagggaggagtcctgggtcacggtcaccacgccgccgtcctcgaagttcatcacgcgctcccacttgaagccctcggggaaggacagcttcaagtagtcggggatgtcggcggggtgcttcacgtaggccttggagccgtacatgaactgaggggacaggatgtcccaggcgaagggcagggggccacccttggtcaccttcagcttggcggtctgggtgccctcgtaggggcggccctcgccctcgccctcgatctcgaactcgtggccgttcacggagccctccatgtgcaccttgaagcgcatgaactccttgatgatggccatgttatcctcctcgcccttgctcaccatggtggcctgtgttctggcggcaaacccgttgcgaaaaagaacgttcacggcgactactgcacttatatacggttctcccccaccctcgggaaaaaggcggagccagtacacgacatcactttcccagtttaccccgcgccaccttctctaggcaccggatcaattgccgacccctccccccaacttctcggggactgtgggcgatgtgcgctctgcccgaagaaaagaacggaaccgccacgtggaaacagggagaatggacatttcacctaatgacttctgacaggagaacgatgccgatgagatgaccacagcccgaaagtcgcagacgtaaaaggaatcagaagacgataccttccactctctatcctagcgcggatagatgagaaatagtaatctttcaccataaaaaaaaaaggaagggaaaagggaaaaaaaaaaggaaacttctacacagccatcggt

SEQ ID NO: 1541 - DNA, 27 bp, synthetic construct
  source 1..27: mol_type = other DNA; note = LE_FP1/2
cgccgctcctacaggaaggaaatttgc

SEQ ID NO: 1542 - DNA, 22 bp, synthetic construct
  source 1..22: mol_type = other DNA; note = LE_RP1
acggttctcccccaccctcggg

SEQ ID NO: 1543 - DNA, 22 bp, synthetic construct
  source 1..22: mol_type = other DNA; note = LE_RP2
cccagtttaccccgcgccacct

SEQ ID NO: 1544 - DNA, 20 bp, synthetic construct
  source 1..20: mol_type = other DNA; note = RE_FP1
tccggtgcctagagaaggtg

SEQ ID NO: 1545 - DNA, 26 bp, synthetic construct
  source 1..26: mol_type = other DNA; note = RE_RP1
tccagtccccccttttcttttaaaaa

SEQ ID NO: 1546 - DNA, 20 bp, synthetic construct
  source 1..20: mol_type = other DNA; note = RE_FP2
gctccgcctttttcccgagg

SEQ ID NO: 1547 - DNA, 23 bp, synthetic construct
  source 1..23: mol_type = other DNA; note = RE_RP2
acagctgccttgtaagtcattgg

SEQ ID NO: 1548 - RNA, 2220 nt, synthetic construct
  source 1..2220: mol_type = other RNA; note = Generic 2.2kb RNA template to test retron non-specific activity
gggagaatggtatttactctcgaagactttgtcggtgattggcggcaaactgctgggtataatttggatcaggtgctggagcaaggcggcgtcagcagcctgttccaaaacttgggagtctcgatgttgccgtcctccttgaagtcgatgcccttcagctcgatgcggttcaccagggtgtcgccctcgaacttcacctcggcgcgggtcttgtagttgccgttgacactccccacggctaaagccgggggattcaaaaaataagatacattgatgagtttggacaaaccacaactagaatgcagtgaaaaaaatgctttatttgtgaaatttgtgatgctattgctttatttgtaaccattataagctgcaataaacaagttcctctcactctctgatattcatttctttgcaagttataaatactgaataataagatgacatgaactactactcaattaagtgcacctggtttgcgggtcatacaccaagtgcgaggtccttcgggcacctcgacgtcggcagtaacggtgaagccgagccgctcatagaatgggagattcctgggagcggaggtctccagaaacgcaggcaccccggcccgttcggctgcctccactccgggcaacacgacggcactgcctagacccttgccctggtggtcgggagagacgcccacggttgcaagaaaccaagcgggctctttgggtctgtgcggcgccaggaggccttccatctgctgctgggcggccagccgagaacctgacaactcggccattctaggcccgatctcagcaaacactgctccagcttcgacgctctcgggcgtggtccaaaccgcaacagcagcgccatcgtctgcgacccacactttgccgatatcgagcccgacgcgcgttaagaagagttcttgcagctcggtgacacgctctatgtgtctgtccggatcaacggtgtggcgagttgcgggatagtcggcaaacgcggcagccaaagtacgtacggcccgtggcacatcatccctcgtggcgagtctcactgttggtttgtactcggtcataggtccaggattctcttccacatctccggcctgtttcaacagagagaagtttgttgcgccggatccagccagaatcctttcgcaaagccgccatccggtcactccgttgatggttactcgaaacagcagtgagccatcgggattgatcagtctctcgtcaatgatcttgttgccgttccatagtgtccctgttacagtgatcttcttgccgtcaaacacggcgatgccttcgtatggccttccgaaatagtcaatcatgttcggagtaaccccgtctatgaccagtgtgccatagtgcaggatcactttgaaatgatgatcatccacaggatacaccaccttgaatatcttctcgatctggcccatttggtccccgctcagaccttcgtatggaatgatgacatgaatgtcaatcttcagcccattctcaccgcttaacacaatcctttgtataggagttactgacaccccgagattctgaaacaaactggacacacctccctgttcaagtacttgatccaggttgtatcctgctgtctgtcgccagtccccaacgaaatcttcgagtgtgaagactggggcaggaaatgcagcaggcaacaccagaagaaggcccagggagaaagcaactggcccaaaggcgcttgtcgagaaggagttcatggtctgtgttctggcggcaaacccgttgcgaaaaagaacgttcacggcgactactgcacttatatacggttctcccccaccctcgggaaaaaggcggagccagtacacgacatcactttcccagtttaccccgcgccaccttctctaggcaccggttcaattgccgacccctccccccaacttctcggggactgtgggcgatgtgcgctctgcccccccatgcctaaaggcaggggtattacgccacgcgtgataaaaaaacgctgccgcaaaattgcggcagtgctctttgtagaaacatgtggcttgccgtaggtggcatcgccctcgccctcgccggacacgctgaacttgtggccgtttacgtcgccgtccagctcgaccaggatgggcacttatcctgatgggagtctcctctttagagtgacaattaatggggtaacaggatggagactctgtgagcggatcttggcttagcccaaacccaaacccaaacc

SEQ ID NO: 1549 - RNA, 2329 nt, synthetic construct
  source 1..2329: mol_type = other RNA; note = MG154-1 ncRNA with 2.2 kb cargo
ggtaggatactagctcccccgcgtttcgcgggtcaggtaagttgtatgctcgcctgtggctcgaggctgacagatcctgggagaatggtatttactctcgaagactttgtcggtgattggcggcaaactgctgggtataatttggatcaggtgctggagcaaggcggcgtcagcagcctgttccaaaacttgggagtctcgatgttgccgtcctccttgaagtcgatgcccttcagctcgatgcggttcaccagggtgtcgccctcgaacttcacctcggcgcgggtcttgtagttgccgttgacactccccacggctaaagccgggggattcaaaaaataagatacattgatgagtttggacaaaccacaactagaatgcagtgaaaaaaatgctttatttgtgaaatttgtgatgctattgctttatttgtaaccattataagctgcaataaacaagttcctctcactctctgatattcatttctttgcaagttataaatactgaataataagatgacatgaactactactcaattaagtgcacctggtttgcgggtcatacaccaagtgcgaggtccttcgggcacctcgacgtcggcagtaacggtgaagccgagccgctcatagaatgggagattcctgggagcggaggtctccagaaacgcaggcaccccggcccgttcggctgcctccactccgggcaacacgacggcactgcctagacccttgccctggtggtcgggagagacgcccacggttgcaagaaaccaagcgggctctttgggtctgtgcggcgccaggaggccttccatctgctgctgggcggccagccgagaacctgacaactcggccattctaggcccgatctcagcaaacactgctccagcttcgacgctctcgggcgtggtccaaaccgcaacagcagcgccatcgtctgcgacccacactttgccgatatcgagcccgacgcgcgttaagaagagttcttgcagctcggtgacacgctctatgtgtctgtccggatcaacggtgtggcgagttgcgggatagtcggcaaacgcggcagccaaagtacgtacggcccgtggcacatcatccctcgtggcgagtctcactgttggtttgtactcggtcataggtccaggattctcttccacatctccggcctgtttcaacagagagaagtttgttgcgccggatccagccagaatcctttcgcaaagccgccatccggtcactccgttgatggttactcgaaacagcagtgagccatcgggattgatcagtctctcgtcaatgatcttgttgccgttccatagtgtccctgttacagtgatcttcttgccgtcaaacacggcgatgccttcgtatggccttccgaaatagtcaatcatgttcggagtaaccccgtctatgaccagtgtgccatagtgcaggatcactttgaaatgatgatcatccacaggatacaccaccttgaatatcttctcgatctggcccatttggtccccgctcagaccttcgtatggaatgatgacatgaatgtcaatcttcagcccattctcaccgcttaacacaatcctttgtataggagttactgacaccccgagattctgaaacaaactggacacacctccctgttcaagtacttgatccaggttgtatcctgctgtctgtcgccagtccccaacgaaatcttcgagtgtgaagactggggcaggaaatgcagcaggcaacaccagaagaaggcccagggagaaagcaactggcccaaaggcgcttgtcgagaaggagttcatggtctgtgttctggcggcaaacccgttgcgaaaaagaacgttcacggcgactactgcacttatatacggttctcccccaccctcgggaaaaaggcggagccagtacacgacatcactttcccagtttaccccgcgccaccttctctaggcaccggttcaattgccgacccctccccccaacttctcggggactgtgggcgatgtgcgctctgcccccccatgcctaaaggcaggggtattacgccacgcgtgataaaaaaacgctgccgcaaaattgcggcagtgctctttgtagaaacatgtggcttgccgtaggtggcatcgccctcgccctcgccggacacgctgaacttgtggccgtttacgtcgccgtccagctcgaccaggatgggcacttatcctgatgggagtctcctctttagagtgacaattaatggggtaacaggatggagactctgtgagcggatcttggcttagcccaaacccaaacccaaaccattactgtcagcaatactgtgtagtatcctt

SEQ ID NO: 1550 - RNA, 2364 nt, synthetic construct
  source 1..2364: mol_type = other RNA; note = MG157-3 ncRNA with 2.2 kb cargo
ggagttctttttagacgcgaagtatattatagtaatgtattagcgagtggatgttgtttcggcatccgagtttaaaactgaactttgtcatcgcaattctaaagggggagaatggtatttactctcgaagactttgtcggtgattggcggcaaactgctgggtataatttggatcaggtgctggagcaaggcggcgtcagcagcctgttccaaaacttgggagtctcgatgttgccgtcctccttgaagtcgatgcccttcagctcgatgcggttcaccagggtgtcgccctcgaacttcacctcggcgcgggtcttgtagttgccgttgacactccccacggctaaagccgggggattcaaaaaataagatacattgatgagtttggacaaaccacaactagaatgcagtgaaaaaaatgctttatttgtgaaatttgtgatgctattgctttatttgtaaccattataagctgcaataaacaagttcctctcactctctgatattcatttctttgcaagttataaatactgaataataagatgacatgaactactactcaattaagtgcacctggtttgcgggtcatacaccaagtgcgaggtccttcgggcacctcgacgtcggcagtaacggtgaagccgagccgctcatagaatgggagattcctgggagcggaggtctccagaaacgcaggcaccccggcccgttcggctgcctccactccgggcaacacgacggcactgcctagacccttgccctggtggtcgggagagacgcccacggttgcaagaaaccaagcgggctctttgggtctgtgcggcgccaggaggccttccatctgctgctgggcggccagccgagaacctgacaactcggccattctaggcccgatctcagcaaacactgctccagcttcgacgctctcgggcgtggtccaaaccgcaacagcagcgccatcgtctgcgacccacactttgccgatatcgagcccgacgcgcgttaagaagagttcttgcagctcggtgacacgctctatgtgtctgtccggatcaacggtgtggcgagttgcgggatagtcggcaaacgcggcagccaaagtacgtacggcccgtggcacatcatccctcgtggcgagtctcactgttggtttgtactcggtcataggtccaggattctcttccacatctccggcctgtttcaacagagagaagtttgttgcgccggatccagccagaatcctttcgcaaagccgccatccggtcactccgttgatggttactcgaaacagcagtgagccatcgggattgatcagtctctcgtcaatgatcttgttgccgttccatagtgtccctgttacagtgatcttcttgccgtcaaacacggcgatgccttcgtatggccttccgaaatagtcaatcatgttcggagtaaccccgtctatgaccagtgtgccatagtgcaggatcactttgaaatgatgatcatccacaggatacaccaccttgaatatcttctcgatctggcccatttggtccccgctcagaccttcgtatggaatgatgacatgaatgtcaatcttcagcccattctcaccgcttaacacaatcctttgtataggagttactgacaccccgagattctgaaacaaactggacacacctccctgttcaagtacttgatccaggttgtatcctgctgtctgtcgccagtccccaacgaaatcttcgagtgtgaagactggggcaggaaatgcagcaggcaacaccagaagaaggcccagggagaaagcaactggcccaaaggcgcttgtcgagaaggagttcatggtctgtgttctggcggcaaacccgttgcgaaaaagaacgttcacggcgactactgcacttatatacggttctcccccaccctcgggaaaaaggcggagccagtacacgacatcactttcccagtttaccccgcgccaccttctctaggcaccggttcaattgccgacccctccccccaacttctcggggactgtgggcgatgtgcgctctgcccccccatgcctaaaggcaggggtattacgccacgcgtgataaaaaaacgctgccgcaaaattgcggcagtgctctttgtagaaacatgtggcttgccgtaggtggcatcgccctcgccctcgccggacacgctgaacttgtggccgtttacgtcgccgtccagctcgaccaggatgggcacttatcctgatgggagtctcctctttagagtgacaattaatggggtaacaggatggagactctgtgagcggatcttggcttagcccaaacccaaacccaaacccctttagattcactcaagaattgtggagtaaaaagaact

SEQ ID NO: 1551 - RNA, 2381 nt, synthetic construct
  source 1..2381: mol_type = other RNA; note = MG157-1 ncRNA with 2.2 kb cargo
ggagaagagttcttagccagaccaagctgggttgccattttggtctgagcggtgattcgccgctctagatgaaaactttggtttatcgtattaatgtttaattgctgggagaatggtatttactctcgaagactttgtcggtgattggcggcaaactgctgggtataatttggatcaggtgctggagcaaggcggcgtcagcagcctgttccaaaacttgggagtctcgatgttgccgtcctccttgaagtcgatgcccttcagctcgatgcggttcaccagggtgtcgccctcgaacttcacctcggcgcgggtcttgtagttgccgttgacactccccacggctaaagccgggggattcaaaaaataagatacattgatgagtttggacaaaccacaactagaatgcagtgaaaaaaatgctttatttgtgaaatttgtgatgctattgctttatttgtaaccattataagctgcaataaacaagttcctctcactctctgatattcatttctttgcaagttataaatactgaataataagatgacatgaactactactcaattaagtgcacctggtttgcgggtcatacaccaagtgcgaggtccttcgggcacctcgacgtcggcagtaacggtgaagccgagccgctcatagaatgggagattcctgggagcggaggtctccagaaacgcaggcaccccggcccgttcggctgcctccactccgggcaacacgacggcactgcctagacccttgccctggtggtcgggagagacgcccacggttgcaagaaaccaagcgggctctttgggtctgtgcggcgccaggaggccttccatctgctgctgggcggccagccgagaacctgacaactcggccattctaggcccgatctcagcaaacactgctccagcttcgacgctctcgggcgtggtccaaaccgcaacagcagcgccatcgtctgcgacccacactttgccgatatcgagcccgacgcgcgttaagaagagttcttgcagctcggtgacacgctctatgtgtctgtccggatcaacggtgtggcgagttgcgggatagtcggcaaacgcggcagccaaagtacgtacggcccgtggcacatcatccctcgtggcgagtctcactgttggtttgtactcggtcataggtccaggattctcttccacatctccggcctgtttcaacagagagaagtttgttgcgccggatccagccagaatcctttcgcaaagccgccatccggtcactccgttgatggttactcgaaacagcagtgagccatcgggattgatcagtctctcgtcaatgatcttgttgccgttccatagtgtccctgttacagtgatcttcttgccgtcaaacacggcgatgccttcgtatggccttccgaaatagtcaatcatgttcggagtaaccccgtctatgaccagtgtgccatagtgcaggatcactttgaaatgatgatcatccacaggatacaccaccttgaatatcttctcgatctggcccatttggtccccgctcagaccttcgtatggaatgatgacatgaatgtcaatcttcagcccattctcaccgcttaacacaatcctttgtataggagttactgacaccccgagattctgaaacaaactggacacacctccctgttcaagtacttgatccaggttgtatcctgctgtctgtcgccagtccccaacgaaatcttcgagtgtgaagactggggcaggaaatgcagcaggcaacaccagaagaaggcccagggagaaagcaactggcccaaaggcgcttgtcgagaaggagttcatggtctgtgttctggcggcaaacccgttgcgaaaaagaacgttcacggcgactactgcacttatatacggttctcccccaccctcgggaaaaaggcggagccagtacacgacatcactttcccagtttaccccgcgccaccttctctaggcaccggttcaattgccgacccctccccccaacttctcggggactgtgggcgatgtgcgctctgcccccccatgcctaaaggcaggggtattacgccacgcgtgataaaaaaacgctgccgcaaaattgcggcagtgctctttgtagaaacatgtggcttgccgtaggtggcatcgccctcgccctcgccggacacgctgaacttgtggccgtttacgtcgccgtccagctcgaccaggatgggcacttatcctgatgggagtctcctctttagagtgacaattaatggggtaacaggatggagactctgtgagcggatcttggcttagcccaaacccaaacccaaacccgcattaaacattaacaattatttttgaagtaagaactctacttatttaagaaat

SEQ ID NO: 1552 - RNA, 2381 nt, synthetic construct
  source 1..2381: mol_type = other RNA; note = MG157-4 ncRNA with 2.2 kb cargo
ggaaagttctttttagacgcttttttattatgtatgtaataaacaaaaagcgagtgagtgttgttccgacactcgagttttaaacttagatactatcatcgcaaattttaagtgcagggagaatggtatttactctcgaagactttgtcggtgattggcggcaaactgctgggtataatttggatcaggtgctggagcaaggcggcgtcagcagcctgttccaaaacttgggagtctcgatgttgccgtcctccttgaagtcgatgcccttcagctcgatgcggttcaccagggtgtcgccctcgaacttcacctcggcgcgggtcttgtagttgccgttgacactccccacggctaaagccgggggattcaaaaaataagatacattgatgagtttggacaaaccacaactagaatgcagtgaaaaaaatgctttatttgtgaaatttgtgatgctattgctttatttgtaaccattataagctgcaataaacaagttcctctcactctctgatattcatttctttgcaagttataaatactgaataataagatgacatgaactactactcaattaagtgcacctggtttgcgggtcatacaccaagtgcgaggtccttcgggcacctcgacgtcggcagtaacggtgaagccgagccgctcatagaatgggagattcctgggagcggaggtctccagaaacgcaggcaccccggcccgttcggctgcctccactccgggcaacacgacggcactgcctagacccttgccctggtggtcgggagagacgcccacggttgcaagaaaccaagcgggctctttgggtctgtgcggcgccaggaggccttccatctgctgctgggcggccagccgagaacctgacaactcggccattctaggcccgatctcagcaaacactgctccagcttcgacgctctcgggcgtggtccaaaccgcaacagcagcgccatcgtctgcgacccacactttgccgatatcgagcccgacgcgcgttaagaagagttcttgcagctcggtgacacgctctatgtgtctgtccggatcaacggtgtggcgagttgcgggatagtcggcaaacgcggcagccaaagtacgtacggcccgtggcacatcatccctcgtggcgagtctcactgttggtttgtactcggtcataggtccaggattctcttccacatctccggcctgtttcaacagagagaagtttgttgcgccggatccagccagaatcctttcgcaaagccgccatccggtcactccgttgatggttactcgaaacagcagtgagccatcgggattgatcagtctctcgtcaatgatcttgttgccgttccatagtgtccctgttacagtgatcttcttgccgtcaaacacggcgatgccttcgtatggccttccgaaatagtcaatcatgttcggagtaaccccgtctatgaccagtgtgccatagtgcaggatcactttgaaatgatgatcatccacaggatacaccaccttgaatatcttctcgatctggcccatttggtccccgctcagaccttcgtatggaatgatgacatgaatgtcaatcttcagcccattctcaccgcttaacacaatcctttgtataggagttactgacaccccgagattctgaaacaaactggacacacctccctgttcaagtacttgatccaggttgtatcctgctgtctgtcgccagtccccaacgaaatcttcgagtgtgaagactggggcaggaaatgcagcaggcaacaccagaagaaggcccagggagaaagcaactggcccaaaggcgcttgtcgagaaggagttcatggtctgtgttctggcggcaaacccgttgcgaaaaagaacgttcacggcgactactgcacttatatacggttctcccccaccctcgggaaaaaggcggagccagtacacgacatcactttcccagtttaccccgcgccaccttctctaggcaccggttcaattgccgacccctccccccaacttctcggggactgtgggcgatgtgcgctctgcccccccatgcctaaaggcaggggtattacgccacgcgtgataaaaaaacgctgccgcaaaattgcggcagtgctctttgtagaaacatgtggcttgccgtaggtggcatcgccctcgccctcgccggacacgctgaacttgtggccgtttacgtcgccgtccagctcgaccaggatgggcacttatcctgatgggagtctcctctttagagtgacaattaatggggtaacaggatggagactctgtgagcggatcttggcttagcccaaacccaaacccaaacccacacttaaatttcactcaactattgagaagtattaagaactttc

SEQ ID NO: 1553 - RNA, 2430 nt, synthetic construct
  source 1..2430: mol_type = other RNA; note = MG158-1 ncRNA with 2.2 kb cargo
ggaccttggttttcagaaccaggtagggagtccctatctttattaatgttatttaatagctatgaatataagctctgcttatattcataccaagtgctagtcgcacttggtatgataaccttacgaaatatttaggatatttctaaggttatcaaagtgaaatgaaagaagcagatgttgaagggagaatggtatttactctcgaagactttgtcggtgattggcggcaaactgctgggtataatttggatcaggtgctggagcaaggcggcgtcagcagcctgttccaaaacttgggagtctcgatgttgccgtcctccttgaagtcgatgcccttcagctcgatgcggttcaccagggtgtcgccctcgaacttcacctcggcgcgggtcttgtagttgccgttgacactccccacggctaaagccgggggattcaaaaaataagatacattgatgagtttggacaaaccacaactagaatgcagtgaaaaaaatgctttatttgtgaaatttgtgatgctattgctttatttgtaaccattataagctgcaataaacaagttcctctcactctctgatattcatttctttgcaagttataaatactgaataataagatgacatgaactactactcaattaagtgcacctggtttgcgggtcatacaccaagtgcgaggtccttcgggcacctcgacgtcggcagtaacggtgaagccgagccgctcatagaatgggagattcctgggagcggaggtctccagaaacgcaggcaccccggcccgttcggctgcctccactccgggcaacacgacggcactgcctagacccttgccctggtggtcgggagagacgcccacggttgcaagaaaccaagcgggctctttgggtctgtgcggcgccaggaggccttccatctgctgctgggcggccagccgagaacctgacaactcggccattctaggcccgatctcagcaaacactgctccagcttcgacgctctcgggcgtggtccaaaccgcaacagcagcgccatcgtctgcgacccacactttgccgatatcgagcccgacgcgcgttaagaagagttcttgcagctcggtgacacgctctatgtgtctgtccggatcaacggtgtggcgagttgcgggatagtcggcaaacgcggcagccaaagtacgtacggcccgtggcacatcatccctcgtggcgagtctcactgttggtttgtactcggtcataggtccaggattctcttccacatctccggcctgtttcaacagagagaagtttgttgcgccggatccagccagaatcctttcgcaaagccgccatccggtcactccgttgatggttactcgaaacagcagtgagccatcgggattgatcagtctctcgtcaatgatcttgttgccgttccatagtgtccctgttacagtgatcttcttgccgtcaaacacggcgatgccttcgtatggccttccgaaatagtcaatcatgttcggagtaaccccgtctatgaccagtgtgccatagtgcaggatcactttgaaatgatgatcatccacaggatacaccaccttgaatatcttctcgatctggcccatttggtccccgctcagaccttcgtatggaatgatgacatgaatgtcaatcttcagcccattctcaccgcttaacacaatcctttgtataggagttactgacaccccgagattctgaaacaaactggacacacctccctgttcaagtacttgatccaggttgtatcctgctgtctgtcgccagtccccaacgaaatcttcgagtgtgaagactggggcaggaaatgcagcaggcaacaccagaagaaggcccagggagaaagcaactggcccaaaggcgcttgtcgagaaggagttcatggtctgtgttctggcggcaaacccgttgcgaaaaagaacgttcacggcgactactgcacttatatacggttctcccccaccctcgggaaaaaggcggagccagtacacgacatcactttcccagtttaccccgcgccaccttctctaggcaccggttcaattgccgacccctccccccaacttctcggggactgtgggcgatgtgcgctctgcccccccatgcctaaaggcaggggtattacgccacgcgtgataaaaaaacgctgccgcaaaattgcggcagtgctctttgtagaaacatgtggcttgccgtaggtggcatcgccctcgccctcgccggacacgctgaacttgtggccgtttacgtcgccgtccagctcgaccaggatgggcacttatcctgatgggagtctcctctttagagtgacaattaatggggtaacaggatggagactctgtgagcggatcttggcttagcccaaacccaaacccaaacccccaacatctgaacgtgaaaaccaaggt

SEQ ID NO: 1554 - RNA, 2392 nt, synthetic construct
  source 1..2392: mol_type = other RNA; note = MG159-3 ncRNA with 2.2 kb cargo
ggggatgcggcggcgggccggaccttgcgacccgggcggcgtttcgccgtccccgcgatctggcttcccacgcgtcaccggctcgatcttcactgggccgaatttgggagaatggtatttactctcgaagactttgtcggtgattggcggcaaactgctgggtataatttggatcaggtgctggagcaaggcggcgtcagcagcctgttccaaaacttgggagtctcgatgttgccgtcctccttgaagtcgatgcccttcagctcgatgcggttcaccagggtgtcgccctcgaacttcacctcggcgcgggtcttgtagttgccgttgacactccccacggctaaagccgggggattcaaaaaataagatacattgatgagtttggacaaaccacaactagaatgcagtgaaaaaaatgctttatttgtgaaatttgtgatgctattgctttatttgtaaccattataagctgcaataaacaagttcctctcactctctgatattcatttctttgcaagttataaatactgaataataagatgacatgaactactactcaattaagtgcacctggtttgcgggtcatacaccaagtgcgaggtccttcgggcacctcgacgtcggcagtaacggtgaagccgagccgctcatagaatgggagattcctgggagcggaggtctccagaaacgcaggcaccccggcccgttcggctgcctccactccgggcaacacgacggcactgcctagacccttgccctggtggtcgggagagacgcccacggttgcaagaaaccaagcgggctctttgggtctgtgcggcgccaggaggccttccatctgctgctgggcggccagccgagaacctgacaactcggccattctaggcccgatctcagcaaacactgctccagcttcgacgctctcgggcgtggtccaaaccgcaacagcagcgccatcgtctgcgacccacactttgccgatatcgagcccgacgcgcgttaagaagagttcttgcagctcggtgacacgctctatgtgtctgtccggatcaacggtgtggcgagttgcgggatagtcggcaaacgcggcagccaaagtacgtacggcccgtggcacatcatccctcgtggcgagtctcactgttggtttgtactcggtcataggtccaggattctcttccacatctccggcctgtttcaacagagagaagtttgttgcgccggatccagccagaatcctttcgcaaagccgccatccggtcactccgttgatggttactcgaaacagcagtgagccatcgggattgatcagtctctcgtcaatgatcttgttgccgttccatagtgtccctgttacagtgatcttcttgccgtcaaacacggcgatgccttcgtatggccttccgaaatagtcaatcatgttcggagtaaccccgtctatgaccagtgtgccatagtgcaggatcactttgaaatgatgatcatccacaggatacaccaccttgaatatcttctcgatctggcccatttggtccccgctcagaccttcgtatggaatgatgacatgaatgtcaatcttcagcccattctcaccgcttaacacaatcctttgtataggagttactgacaccccgagattctgaaacaaactggacacacctccctgttcaagtacttgatccaggttgtatcctgctgtctgtcgccagtccccaacgaaatcttcgagtgtgaagactggggcaggaaatgcagcaggcaacaccagaagaaggcccagggagaaagcaactggcccaaaggcgcttgtcgagaaggagttcatggtctgtgttctggcggcaaacccgttgcgaaaaagaacgttcacggcgactactgcacttatatacggttctcccccaccctcgggaaaaaggcggagccagtacacgacatcactttcccagtttaccccgcgccaccttctctaggcaccggttcaattgccgacccctccccccaacttctcggggactgtgggcgatgtgcgctctgcccccccatgcctaaaggcaggggtattacgccacgcgtgataaaaaaacgctgccgcaaaattgcggcagtgctctttgtagaaacatgtggcttgccgtaggtggcatcgccctcgccctcgccggacacgctgaacttgtggccgtttacgtcgccgtccagctcgaccaggatgggcacttatcctgatgggagtctcctctttagagtgacaattaatggggtaacaggatggagactctgtgagcggatcttggcttagcccaaacccaaacccaaaccaattcggcgtcgagtggaccgatccggtccttggatttgacgaaggcgcccgtccttcgcatcccct

SEQ ID NO: 1555 - RNA, 2341 nt, synthetic construct
  source 1..2341: mol_type = other RNA; note = MG173-1 ncRNA with 2.2 kb cargo
ggctccaagtctgctagcaaagagtgtattcgctctgaagaagacggcactaactgggtggagggagaatggtatttactctcgaagactttgtcggtgattggcggcaaactgctgggtataatttggatcaggtgctggagcaaggcggcgtcagcagcctgttccaaaacttgggagtctcgatgttgccgtcctccttgaagtcgatgcccttcagctcgatgcggttcaccagggtgtcgccctcgaacttcacctcggcgcgggtcttgtagttgccgttgacactccccacggctaaagccgggggattcaaaaaataagatacattgatgagtttggacaaaccacaactagaatgcagtgaaaaaaatgctttatttgtgaaatttgtgatgctattgctttatttgtaaccattataagctgcaataaacaagttcctctcactctctgatattcatttctttgcaagttataaatactgaataataagatgacatgaactactactcaattaagtgcacctggtttgcgggtcatacaccaagtgcgaggtccttcgggcacctcgacgtcggcagtaacggtgaagccgagccgctcatagaatgggagattcctgggagcggaggtctccagaaacgcaggcaccccggcccgttcggctgcctccactccgggcaacacgacggcactgcctagacccttgccctggtggtcgggagagacgcccacggttgcaagaaaccaagcgggctctttgggtctgtgcggcgccaggaggccttccatctgctgctgggcggccagccgagaacctgacaactcggccattctaggcccgatctcagcaaacactgctccagcttcgacgctctcgggcgtggtccaaaccgcaacagcagcgccatcgtctgcgacccacactttgccgatatcgagcccgacgcgcgttaagaagagttcttgcagctcggtgacacgctctatgtgtctgtccggatcaacggtgtggcgagttgcgggatagtcggcaaacgcggcagccaaagtacgtacggcccgtggcacatcatccctcgtggcgagtctcactgttggtttgtactcggtcataggtccaggattctcttccacatctccggcctgtttcaacagagagaagtttgttgcgccggatccagccagaatcctttcgcaaagccgccatccggtcactccgttgatggttactcgaaacagcagtgagccatcgggattgatcagtctctcgtcaatgatcttgttgccgttccatagtgtccctgttacagtgatcttcttgccgtcaaacacggcgatgccttcgtatggccttccgaaatagtcaatcatgttcggagtaaccccgtctatgaccagtgtgccatagtgcaggatcactttgaaatgatgatcatccacaggatacaccaccttgaatatcttctcgatctggcccatttggtccccgctcagaccttcgtatggaatgatgacatgaatgtcaatcttcagcccattctcaccgcttaacacaatcctttgtataggagttactgacaccccgagattctgaaacaaactggacacacctccctgttcaagtacttgatccaggttgtatcctgctgtctgtcgccagtccccaacgaaatcttcgagtgtgaagactggggcaggaaatgcagcaggcaacaccagaagaaggcccagggagaaagcaactggcccaaaggcgcttgtcgagaaggagttcatggtctgtgttctggcggcaaacccgttgcgaaaaagaacgttcacggcgactactgcacttatatacggttctcccccaccctcgggaaaaaggcggagccagtacacgacatcactttcccagtttaccccgcgccaccttctctaggcaccggttcaattgccgacccctccccccaacttctcggggactgtgggcgatgtgcgctctgcccccccatgcctaaaggcaggggtattacgccacgcgtgataaaaaaacgctgccgcaaaattgcggcagtgctctttgtagaaacatgtggcttgccgtaggtggcatcgccctcgccctcgccggacacgctgaacttgtggccgtttacgtcgccgtccagctcgaccaggatgggcacttatcctgatgggagtctcctctttagagtgacaattaatggggtaacaggatggagactctgtgagcggatcttggcttagcccaaacccaaacccaaacccccaccctagagtttcaatgaacaataaagatttttcggtttcgtagtagacttggagc

SEQ ID NO: 1556 - skipped

SEQ ID NO: 1557 - DNA, 20 bp, synthetic construct
  source 1..20: mol_type = other DNA; note = First100bp_FP
ggtttgggtttgggtttggg

SEQ ID NO: 1558 - DNA, 20 bp, synthetic construct
  source 1..20: mol_type = other DNA; note = First100bp_RP
atcctgatgggagtctcctc

SEQ ID NO: 1559 - DNA, 21 bp, synthetic construct
  source 1..21: mol_type = other DNA; note = Last100bp_FP
gagactcccaagttttggaac

SEQ ID NO: 1560 - DNA, 24 bp, synthetic construct
  source 1..24: mol_type = other DNA; note = Last100bp_RP
gggagaatggtatttactctcgaa

SEQ ID NO: 1561 - DNA, 27 bp, synthetic construct
  source 1..27: mol_type = other DNA; note = First100bp_Taqman probe_FAM
actctgtgagcggatcttggcttagcc

SEQ ID NO: 1562 - DNA, 21 bp, synthetic construct
  source 1..21: mol_type = other DNA; note = Last100bp_Taqman probe_HEX
ctggagcaaggcggcgtcagc

SEQ ID NO: 1563 - RNA, 4146 nt, synthetic construct
  source 1..4146: mol_type = other RNA; note = mammalian_codon_optimized_mRNA
cagaacaagaagaacgtcgactactacgtcggcctggacatgggagatgcctctgttggatgggccgtgaccgacctgaactacaacatcctgaagttcaacggcaaggccctgtggggcatcagactgttcgattctgccgaaaccgccgctgccagaagaggctttagatctgccaggcggcggatcgacagagtgtcttggagaatctccatgctgcaagagctgttcgccgacgagatcgccaaagtggatgccggcttcttccagcggctgaaggatagcagactgcaggtcgaggacaagcaagagaaaaccgcctacaacctgttcgtgggccagaactacaccgacaaggacttctaccagcagtaccccaccatgtaccacctgagatacgccctggctacacaggccggaccttttgatgtgcggctgctgtatctggccgtgcagcacatcgtgaagcaccggggccactttctgttcgagaacctggacgccagcaaagtgggcgatttcgtggccgtgtttggcgaggtggaaagctacgtgcacgacgagatggaactggacgagtggtactgccacgacatcgatgccctggccaaggtgctgtgcaatgccaatctgggcatcaccgccaagcagaaggccatccagaatctgctgcccgccaagaccaagcaagaaaaggccatcgtgcagctgctgagcggcggaaaggccaagctgtgcgacctgttctgtgacgaggaactggccgaatgcgagaaaaagagcatcagcttccaagaggacaacctcgatgagctggaacccatcctggaagctatcctgcaagagagatacgaggccctgctgcggttcaaggccgtgtatgattggagcctgctggccaagatcctgagactggacgccgacaagaaaagcgagaacgagatgcacctcctgagcgagtgcaaagtgaaggtgtacgaggaacacaagaaagacctggctgtgctgaagtccatgctgaagggcaagcccctgtacaacaagctgttcagacaggacggcgaggacacctacgccaattacgcccagggaatcaaagggatcaaccaggtggacttctgcaagtccctgaagaagcagctggaatctatcggcgagtacaagaaacagatgcagcagctgaccagcttcgaggacgcccagaccgatgtggaaagactgctgtttagagtggccaacggcctggctttccccaagcagaccaccaaggacaacggcatcatcccaatccaggttcacctggccgagctgcagtgtatcctggctcacgccgagaagtacctgcctttcctgaagaacgccgacgccaatggcctgagcgtgcgggaaaagatcacccagatcgtgaagttcagaatcccctactacgtgggacccctggccggcacaagactgtctagagaacagggcagatgctgggtcgagcggagagccgagctgaagaatgagaagatctacccctggaacttcgacaaggtggtggacctggaagcctccgccgagaacttcatcaccaacatgaccgccaagtgcacctacctcgtgggcgaagatgtgctccccaaagagtccctgctgtactccgagttcatggtccgaaacgccctgaacaacctgaccatcgacggcgagagactgcccgtttctctgctgcagaaaatctacaagcagctgttcctggaaaagaccttcaaagtgaccaagaaggccctggaacggttcttcaaacaagagaatgtgtcctaccacgatatcggcggcatcgacgacaagatcaacgcctccatgaaggcctacaacgacttcaagcggatcttcggcgaggcctacatcgaaatgcaccgggatgagatcgagaacatcatccggtggatcaccctgttttgcgacgagaagaagatgctcgagacaaagatccgcaagacgtaccctcagatccccgatgataagatcaaggccattaagaagctgaagtacaaggactggggcagactgagcgccacactgctggattctggcaagatcgcctacgaggatgccagcgtgggcgagagaatcaccatcatctctgccctgcggcacaccaacaagaatttcatggaactgctgagcagcaactgccagtacgacttcatcggcaagattaaggacttcaacggctccaagcagagcgacaatggcaagctgacctacaaggatgtggaagaactgtacgtgtcccctagcgtgaagcggagcatctggcagaccctgaccattctggaagagatcaagaaaatcatgggctgcgagcccaagcgcatcttcatcgagatggccagaagcaaagaggaaagcctgcggaccaacagcaggctgcagagactccaggacctgtacaagaagtgcaaagaagagaacatcgacttcatgcccaaggccgacgagctgaccgacatcagatctcagctccagtgcaagaacgaagaggacctgcggagcgacaagctgtacctgtactacacccagatggggagatgcatgtacaccggcgagaggatcgaactggccagcctgtacgaccagaacaaatacgacgtggaccacatctaccccaggtctaagaccaaggacgacagcctgaacaatcgggtgctcgtgaagaaagagattaacagcgccaagacagacaactaccccatcgacgctgacatccggaagaaaatgcacgccttttggaagatgctgtacgacaagggcttcatcgaccaaaagaagtacgagcggctgaccagaagcacccagctgacagatgaagaactggctggcttcatcaaccggcagctggtggaaaccagacagagcacaaaggccaccgccgacattctgaagtctgcctacgagcacagcgaggtggtgtatgtgaaggccggcaacgtgtccgatttccggcagcagttcgacttcgtgaagtgccgggaagtgaacgacctgcaccacgccaaggacgcctacctgaatatcgtcgtgggcaactgctaccacgtcaagttcaccatcaatccgctgatgttcatccggggcaaccaggacaaccggcggtactctctgaagcccgaggtgttctacgcccacgacattaagcggaacggggagattgcttggctggccggcgataatggcaccatggccacagtgaagagagtgatgcagaaaaacaacgtgctgttcacccggctggccgtggaaggcaaaggcgagctgttcaagcagaaccctctgaaggccaagagcggccagctgcctcttaaagccggcctgagcatcgataagtatggcggctacgactccctgagcaccgcctattttgccctggtggaatccgagggcaagaaaggcgccgtgcagtttacaatcgaggccattcctctggtgtacgccaaacagggcgaagccaccatcaagaaatacctgacagaggtggtgcagctgtgcaagcccgagatcaaagtgatgcggatcaagaagtactccctgctgaagatcaatggcttccccatgcacatctccggcagaaccggaaagcagctgatcttctacgtggccagccagctgtgtatcgacgagaacagcgtggcctatctgaagaaagccctgaagtatgagagcaacctcgaggaaaacgaggccatcctggccgataagaatgccgacgagtccatgaagcagaaagccttcaaccggctcatgttctacaaggacacctggggaatcagcgccgaggctaacctgcagctgtacgatatgctgctggctaagagcgccaacaacctctacaagaacagacccgccagccagaccgccactctgaaagagaagagagagcagttcgccaagctgagcctgagcaagcagatccacgtgatcaaagagatcctgaacctgttcaagtgcgcctccgccagcgccgatttcaagctgcttgataagggcgctgcctgcggcatcctgaaagtgtccaacaacatcaccaagctgaagcagtgcgtgctgatcaatcagagccccaccggcgtgttcgagcaagaggttgacctgatgagactg

SEQ ID NO: 1564 - RNA, 107 nt, synthetic construct
  source 1..107: mol_type = other RNA; note = positive_control_MG71-2_C3_AAVS1_C2D2_guide
  modified_base 1..3: mod_base = OTHER; note = 2'O-methyl ribonucleotide
  modified_base 1..4: mod_base = OTHER; note = phosphorothioate linkage
  modified_base 105..107: mod_base = OTHER; note = 2'O-methyl ribonucleotide
  modified_base 104..107: mod_base = OTHER; note = phosphorothioate linkage
tctgggagagggtagcgcagggtggtttgagagtgagaaatcacgagttcaaaaaacatgatttattcaaaccgtcttcttcggaaggccccacagtgtgtggtttt

SEQ ID NO: 1565 - skipped

SEQ ID NO: 1566 - DNA, 38 bp, synthetic construct
  source 1..38: mol_type = other DNA; note = MG71-2n_C3_AAVS1_forward_primer
gctcttccgatctnnnnnactgcttctcctcttgggaa

SEQ ID NO: 1567 - DNA, 38 bp, synthetic construct
  source 1..38: mol_type = other DNA; note = MG71-2n_C3_AAVS1_reverse_primer
gctcttccgatctnnnnnatttcctggagccatctctc

SEQ ID NO: 1568 - RNA, 108 nt, synthetic construct
  source 1..108: mol_type = other RNA; note = hPDK1_MG71-2_G1_guide
  modified_base 1..3: mod_base = OTHER; note = 2'O-methyl ribonucleotide
  modified_base 1..4: mod_base = OTHER; note = phosphorothioate linkage
  modified_base 106..108: mod_base = OTHER; note = 2'O-methyl ribonucleotide
  modified_base 105..108: mod_base = OTHER; note = phosphorothioate linkage
catctgtctgtctgtgggcttcgtttgagagtgagaaatcacgagttcaaaaaacatgatttattcaaaccgtcttcttcggaaggccccacagtgtgtggttttttt

SEQ ID NO: 1569 - RNA, 110 nt, synthetic construct
  source 1..110: mol_type = other RNA; note = G6PC1_Q347*_MG71-2_G1_guide
  modified_base 1..3: mod_base = OTHER; note = 2'O-methyl ribonucleotide
  modified_base 1..4: mod_base = OTHER; note = phosphorothioate linkage
  modified_base 108..110: mod_base = OTHER; note = 2'O-methyl ribonucleotide
  modified_base 107..110: mod_base = OTHER; note = phosphorothioate linkage
ccctggcatccgtcagtgtcatccgtttgagagtgagaaatcacgagttcaaaaaacatgatttattcaaaccgtcttcttcggaaggccccacagtgtgtggttttttt

SEQ ID NO: 1570 - RNA, 110 nt, synthetic construct
  source 1..110: mol_type = other RNA; note = G6PC1_Q347*_MG71-2_G2_guide
  modified_base 1..3: mod_base = OTHER; note = 2'O-methyl ribonucleotide
  modified_base 1..4: mod_base = OTHER; note = phosphorothioate linkage
  modified_base 108..110: mod_base = OTHER; note = 2'O-methyl ribonucleotide
  modified_base 107..110: mod_base = OTHER; note = phosphorothioate linkage
accgaagactccacatctcttacagtttgagagtgagaaatcacgagttcaaaaaacatgatttattcaaaccgtcttcttcggaaggccccacagtgtgtggttttttt

SEQ ID NO: 1571 - RNA, 110 nt, synthetic construct
  source 1..110: mol_type = other RNA; note = PAH_R408W_MG71-2_G1_guide
  modified_base 1..3: mod_base = OTHER; note = 2'O-methyl ribonucleotide
  modified_base 1..4: mod_base = OTHER; note = phosphorothioate linkage
  modified_base 108..110: mod_base = OTHER; note = 2'O-methyl ribonucleotide
  modified_base 107..110: mod_base = OTHER; note = phosphorothioate linkage
ctcaagcctgtggttttggtcttagtttgagagtgagaaatcacgagttcaaaaaacatgatttattcaaaccgtcttcttcggaaggccccacagtgtgtggttttttt

SEQ ID NO: 1572 - RNA, 110 nt, synthetic construct
  source 1..110: mol_type = other RNA; note = PAH_R408W_MG71-2_G2_guide
  modified_base 1..3: mod_base = OTHER; note = 2'O-methyl ribonucleotide
  modified_base 1..4: mod_base = OTHER; note = phosphorothioate linkage
  modified_base 108..110: mod_base = OTHER; note = 2'O-methyl ribonucleotide
  modified_base 107..110: mod_base = OTHER; note = phosphorothioate linkage
atcctttgggtgtatgggtcgtaggtttgagagtgagaaatcacgagttcaaaaaacatgatttattcaaaccgtcttcttcggaaggccccacagtgtgtggttttttt

SEQ ID NO: 1573 - RNA, 110 nt, synthetic construct
  source 1..110: mol_type = other RNA; note = HBB_PAM1_guide
  modified_base 1..3: mod_base = OTHER; note = 2'O-methyl ribonucleotide
  modified_base 1..4: mod_base = OTHER; note = phosphorothioate linkage
  modified_base 108..110: mod_base = OTHER; note = 2'O-methyl ribonucleotide
  modified_base 107..110: mod_base = OTHER; note = phosphorothioate linkage
ccttgccccacagggcagtaacgggtttgagagtgagaaatcacgagttcaaaaaacatgatttattcaaaccgtcttcttcggaaggccccacagtgtgtggttttttt

SEQ ID NO: 1574 - RNA, 138 nt, synthetic construct
  source 1..138: mol_type = other RNA; note = HBB_PAM1_pegPBS8
  modified_base 1..3: mod_base = OTHER; note = 2'O-methyl ribonucleotide
  modified_base 1..4: mod_base = OTHER; note = phosphorothioate linkage
  modified_base 136..138: mod_base = OTHER; note = 2'O-methyl ribonucleotide
  modified_base 135..138: mod_base = OTHER; note = phosphorothioate linkage
ccttgccccacagggcagtaacgggtttgagagtgagaaatcacgagttcaaaaaacatgatttattcaaaccgtcttcttcggaaggccccacagtgtgtggtcctgtggagaagtctgccgttactgccttttttt

SEQ ID NO: 1575 - RNA, 140 nt, synthetic construct
  source 1..140: mol_type = other RNA; note = HBB_PAM1_pegPBS10
  modified_base 1..3: mod_base = OTHER; note = 2'O-methyl ribonucleotide
  modified_base 1..4: mod_base = OTHER; note = phosphorothioate linkage
  modified_base 138..140: mod_base = OTHER; note = 2'O-methyl ribonucleotide
  modified_base 137..140: mod_base = OTHER; note = phosphorothioate linkage
ccttgccccacagggcagtaacgggtttgagagtgagaaatcacgagttcaaaaaacatgatttattcaaaccgtcttcttcggaaggccccacagtgtgtggtcctgtggagaagtctgccgttactgccctttttttt

SEQ ID NO: 1576 - RNA, 143 nt, synthetic construct
  source 1..143: mol_type = other RNA; note = HBB_PAM1_pegPBS13
  modified_base 1..3: mod_base = OTHER; note = 2'O-methyl ribonucleotide
  modified_base 1..4: mod_base = OTHER; note = phosphorothioate linkage
  modified_base 141..143: mod_base = OTHER; note = 2'O-methyl ribonucleotide
  modified_base 140..143: mod_base = OTHER; note = phosphorothioate linkage
ccttgccccacagggcagtaacgggtttgagagtgagaaatcacgagttcaaaaaacatgatttattcaaaccgtcttcttcggaaggccccacagtgtgtggtcctgtggagaagtctgccgttactgccctgtgttttttt

SEQ ID NO: 1577 - DNA, 39 bp, synthetic construct
  source 1..39: mol_type = other DNA; note = hPDK1_forward_NGS_primer
gctcttccgatctnnnnntggagtcggagtggacaccgc

SEQ ID NO: 1578 - DNA, 42 bp, synthetic construct
  source 1..42: mol_type = other DNA; note = hPDK1_reverse_NGS_primer
gctcttccgatctnnnnngtacctgaggactcggggaaataa

SEQ ID NO: 1579 - DNA, 256 bp, synthetic construct
  source 1..256: mol_type = other DNA; note = hPDK1_targeted_amplified_ngs
tggagtcggagtggacaccgctcagtattactttctgccgctgtcaaggccgagggccaggcagaatggctgcacgtaggttccccagagagcaggcaggggcatctgtctgtctgtgggcttcagcactttaaagaggctgtgtggccaaccaggacccagggtcccctccccagctcccttgggaaggacacagcagtattggacggtttctagcctctgagatgctaatttatttccccgagtcctcaggtac

SEQ ID NO: 1580 - DNA, 39 bp, synthetic construct
  source 1..39: mol_type = other DNA; note = A1AT_forward_NGS_primer
gctcttccgatctnnnnntgagcgcttcctgggaggtgt

SEQ ID NO: 1581 - DNA, 41 bp, synthetic construct
  source 1..41: mol_type = other DNA; note = A1AT_reverse_NGS_primer
gctcttccgatctnnnnnccatgaagaggggagacttggta

SEQ ID NO: 1582 - DNA, 250 bp, synthetic construct
  source 1..250: mol_type = other DNA; note = A1AT_targeted_amplified_ngs
tgagcgcttcctgggaggtgtccacgtgagccttgctcgaggcctgggatcagccttacaacgtgtctctgcttctctcccctccaggccgtgcataaggctgtgctgaccatcgacgagaaagggactgaagctgctggggccatgtttttagaggccatacccatgtctatcccccccgaggtcaagttcaacaaaccctttgtcttcttaatgattgaacaaaataccaagtctcccctcttcatgg

SEQ ID NO: 1583 - DNA, 39 bp, synthetic construct
  source 1..39: mol_type = other DNA; note = G6PC1_Q347*_forward_NGS_primer
gctcttccgatctnnnnntcctcctgcacgtctttgact

SEQ ID NO: 1584 - DNA, 41 bp, synthetic construct
  source 1..41: mol_type = other DNA; note = G6PC1_Q347*_reverse_NGS_primer
gctcttccgatctnnnnngaatggatggcatgtcacttgct

SEQ ID NO: 1585 - DNA, 276 bp, synthetic construct
  source 1..276: mol_type = other DNA; note = G6PC1_Q347*_targeted_amplified_ngs
tcctcctgcacgtctttgactccttgaaacccccatcccaagtcgagctggtcttctacgtcttgtccttctgcaagagtgcggtagtgcccctggcatccgtcagtgtcatcccctactgcctcgcccaggtcctgggccagccgcacaagaagtcgttgtaagagatgtggagtcttcggtgtttaaagtcaacaaccatgccagggattgaggaggactactatttgaagcaatgggcactggtatttggagcaagtgacatgccatccattc

SEQ ID NO: 1586 - DNA, 40 bp, synthetic construct
  source 1..40: mol_type = other DNA; note = PAH_R408W_forward_NGS_primer
gctcttccgatctnnnnnttgaagaccctgctctagggag

SEQ ID NO: 1587 - DNA, 41 bp, synthetic construct
  source 1..41: mol_type = other DNA; note = PAH_R408W_reverse_NGS_primer
gctcttccgatctnnnnnaccgagtggcctcgtaaggtgta

SEQ ID NO: 1588 - DNA, 275 bp, synthetic construct
  source 1..275: mol_type = other DNA; note = PAH_R408W_targeted_amplified_ngs
ttgaagaccctgctctagggaggtgtccgtgttcctaaaaaagaagtaaaatgccactgagaactctcttaagactacctttctccaaatggtgcccttcactcaagcctgtggttttggtcttaggaactttgctgccacaatacctcggcccttctcagttcgctacgacccatacacccaaaggattgaggtcttggacaatacccagcagcttaagattttggctgattccattaacagtaagtaatttacaccttacgaggccactcggt

SEQ ID NO: 1589 - DNA, 42 bp, synthetic construct
  source 1..42: mol_type = other DNA; note = HBB_71-2_forward_NGS_primer
gctcttccgatctnnnnngtcagtgcctatcagaaacccaag

SEQ ID NO: 1590 - DNA, 39 bp, synthetic construct
  source 1..39: mol_type = other DNA; note = HBB_71-2_reverse_NGS_primer
gctcttccgatctnnnnngccagggctgggcataaaagt

SEQ ID NO: 1591 - DNA, 281 bp, synthetic construct
  source 1..281: mol_type = other DNA; note = HBB_71-2_targeted_amplified_ngs
gtcagtgcctatcagaaacccaagagtcttctctgtctccacatgcccagtttctattggtctccttaaacctgtcttgtaaccttgataccaacctgcccagggcctcaccaccaacttcatccacgttcaccttgccccacagggcagtaacggcagacttctcctcaggagtcagatgcaccatggtgtctgtttgaggttgctagtgaacacagttgtgtcagaagcaaatgtaagcaatagatggctctgccctgacttttatgcccagccctggc

SEQ ID NO: 1592 - DNA, 5178 bp, synthetic construct
  source 1..5178: mol_type = other DNA; note tethered_mammalian_codon_optimized_MG160-4(H230R)-33AA-MG71 -2n
atgaagaggaccgctgatggttccgaatttgaatctcctaagaagaaacgaaaggttgttacccagaagtggacccatcgataccagttgaaacccggccgatgggtttttgcccccacagatgaggccaagaagtgcggtgctcacattaagcgcagcgtggcttccaggtggaaggccccaaacttctactatcacctcagaaatggcgggcacgttgcggccgtacggtcccacgaactgagccggtttttcttccgggcagatttggacgatttctttgggagagtgaaccggtctcgcgtgacccggtgccttaaaccttggttctcatacgccgaagcaagggagatggcctcagaatctgtcgtgaagcgacctggagagacagcctttgtgctgccgtatgggttcgtgcagagccctatcctcgcatccttggccctggacaagagtaaactgggtagcctgctgagatcactggacgggggccgcgatttcacggtgagcgtctatgtcgacgacatcattatctctggagacgacgaagctcaacttaaagaggtagcatcccgccttgagagagtggcgagtgaggccctgtttccactcagcagtggcaaaactcagggacccgcctctggagtgactgtttttaacatagaactgtcccatagaatgctcaggattaccgatgataggctcgcttcactgaggctcgactatcaggcgactgcatctgagaggtgtaaagctggcatcgtctcctacgtatacagtgtgaatccagatcaggtcgctcaagtgacatctggcggcagcagcggcggctcaagcggaagtgaaacacctggaacttccgaaagcgctacgcctgaatcttctggtggatcttctggcggatcttccgcatgccagaacaagaagaacgtcgactactacgtcggcctggacatgggagatgcctctgttggatgggccgtgaccgacctgaactacaacatcctgaagttcaacggcaaggccctgtggggcatcagactgttcgattctgccgaaaccgccgctgccagaagaggctttagatctgccaggcggcggatcgacagagtgtcttggagaatctccatgctgcaagagctgttcgccgacgagatcgccaaagtggatgccggcttcttccagcggctgaaggatagcagactgcaggtcgaggacaagcaagagaaaaccgcctacaacctgttcgtgggccagaactacaccgacaaggacttctaccagcagtaccccaccatgtaccacctgagatacgccctggctacacaggccggaccttttgatgtgcggctgctgtatctggccgtgcagcacatcgtgaagcaccggggccactttctgttcgagaacctggacgccagcaaagtgggcgatttcgtggccgtgtttggcgaggtggaaagctacgtgcacgacgagatggaactggacgagtggtactgccacgacatcgatgccctggccaaggtgctgtgcaatgccaatctgggcatcaccgccaagcagaaggccatccagaatctgctgcccgccaagaccaagcaagaaaaggccatcgtgcagctgctgagcggcggaaaggccaagctgtgcgacctgttctgtgacgaggaactggccgaatgcgagaaaaagagcatcagcttccaagaggacaacctcgatgagctggaacccatcctggaagctatcctgcaagagagatacgaggccctgctgcggttcaaggccgtgtatgattggagcctgctggccaagatcctgagactggacgccgacaagaaaagcgagaacgagatgcacctcctgagcgagtgcaaagtgaaggtgtacgaggaacacaagaaagacctggctgtgctgaagtccatgctgaagggcaagcccctgtacaacaagctgttcagacaggacggcgaggacacctacgccaattacgcccagggaatcaaagggatcaaccaggtggacttctgcaagtccctgaagaagcagctggaatctatcggcgagtacaagaaacagatgcagcagctgaccagcttcgaggacgcccagaccgatgtggaaagactgctgtttagagtggccaacggcctggctttccccaagcagaccaccaaggacaacggcatcatcccaatccaggttcacctggccgagctgcagtgtatcctggctcacgccgagaagtacctgcctttcctgaagaacgccgacgccaatggcctgagcgtgcgggaaaagatcacccagatcgtgaagttcagaatcccctactacgtgggacccctggccggcacaagactgtctagagaacagggcagatgctgggtcgagcggagagccgagctgaagaatgagaagatctacccctggaacttcgacaaggtggtggacctggaagcctccgccgagaacttcatcaccaacatgaccgccaagtgcacctacctcgtgggcgaagatgtgctccccaaagagtccctgctgtactccgagttcatggtccgaaacgccctgaacaacctgaccatcgacggcgagagactgcccgtttctctgctgcagaaaatctacaagcagctgttcctggaaaagaccttcaaagtgaccaagaaggccctggaacggttcttcaaacaagagaatgtgtcctaccacgatatcggcggcatcgacgacaagatcaacgcctccatgaaggcctacaacgacttcaagcggatcttcggcgaggcctacatcgaaatgcaccgggatgagatcgagaacatcatccggtggatcaccctgttttgcgacgagaagaagatgctcgagacaaagatccgcaagacgtaccctcagatccccgatgataagatcaaggccattaagaagctgaagtacaaggactggggcagactgagcgccacactgctggattctggcaagatcgcctacgaggatgccagcgtgggcgagagaatcaccatcatctctgccctgcggcacaccaacaagaatttcatggaactgctgagcagcaactgccagtacgacttcatcggcaagattaaggacttcaacggctccaagcagagcgacaatggcaagctgacctacaaggatgtggaagaactgtacgtgtcccctagcgtgaagcggagcatctggcagaccctgaccattctggaagagatcaagaaaatcatgggctgcgagcccaagcgcatcttcatcgagatggccagaagcaaagaggaaagcctgcggaccaacagcaggctgcagagactccaggacctgtacaagaagtgcaaagaagagaacatcgacttcatgcccaaggccgacgagctgaccgacatcagatctcagctccagtgcaagaacgaagaggacctgcggagcgacaagctgtacctgtactacacccagatggggagatgcatgtacaccggcgagaggatcgaactggccagcctgtacgaccagaacaaatacgacgtggacgccatctaccccaggtctaagaccaaggacgacagcctgaacaatcgggtgctcgtgaagaaagagattaacagcgccaagacagacaactaccccatcgacgctgacatccggaagaaaatgcacgccttttggaagatgctgtacgacaagggcttcatcgaccaaaagaagtacgagcggctgaccagaagcacccagctgacagatgaagaactggctggcttcatcaaccggcagctggtggaaaccagacagagcacaaaggccaccgccgacattctgaagtctgcctacgagcacagcgaggtggtgtatgtgaaggccggcaacgtgtccgatttccggcagcagttcgacttcgtgaagtgccgggaagtgaacgacctgcaccacgccaaggacgcctacctgaatatcgtcgtgggcaactgctaccacgtcaagttcaccatcaatccgctgatgttcatccggggcaaccaggacaaccggcggtactctctgaagcccgaggtgttctacgcccacgacattaagcggaacggggagattgcttggctggccggcgataatggcaccatggccacagtgaagagagtgatgcagaaaaacaacgtgctgttcacccggctggccgtggaaggcaaaggcgagctgttcaagcagaaccctctgaaggccaagagcggccagctgcctcttaaagccggcctgagcatcgataagtatggcggctacgactccctgagcaccgcctattttgccctggtggaatccgagggcaagaaaggcgccgtgcagtttacaatcgaggccattcctctggtgtacgccaaacagggcgaagccaccatcaagaaatacctgacagaggtggtgcagctgtgcaagcccgagatcaaagtgatgcggatcaagaagtactccctgctgaagatcaatggcttccccatgcacatctccggcagaaccggaaagcagctgatcttctacgtggccagccagctgtgtatcgacgagaacagcgtggcctatctgaagaaagccctgaagtatgagagcaacctcgaggaaaacgaggccatcctggccgataagaatgccgacgagtccatgaagcagaaagccttcaaccggctcatgttctacaaggacacctggggaatcagcgccgaggctaacctgcagctgtacgatatgctgctggctaagagcgccaacaacctctacaagaacagacccgccagccagaccgccactctgaaagagaagagagagcagttcgccaagctgagcctgagcaagcagatccacgtgatcaaagagatcctgaacctgttcaagtgcgcctccgccagcgccgatttcaagctgcttgataagggcgctgcctgcggcatcctgaaagtgtccaacaacatcaccaagctgaagcagtgcgtgctgatcaatcagagccccaccggcgtgttcgagcaagaggttgacctgatgagactgcctaggggcggcggaggcagctacccctatgatgtacctgattatgcttctggcggacccaagaagaagaggaaagtcggtggttctcctaagaaaaagagaaaggtcggatccggc

SEQ ID NO: 1593 - DNA, 6498 bp, synthetic construct
  source 1..6498: mol_type = other DNA; note = tethered_mammalian_codon_optimized_MMLV2-33AA-MG71-2n
atgaagaggaccgctgatggttccgaatttgaatctcctaagaagaaacgaaaggttactctgaacatcgaggacgaatacaggctccacgaaacttctaaggaacctgacgtgtccttgggatcaacttggttgtccgacttcccccaagcttgggccgagacaggcggaatgggtttggccgtgagacaggccccactcataatcccacttaaggcgacatccactccggtcagtatcaagcagtatccaatgtcccaggaagcacgcttaggaattaaaccacatattcaacgactcctggatcaaggtattctcgtcccatgtcaaagcccttggaatacccctcttctgcctgtgaagaagcccggcacaaacgactaccggcccgtgcaagacctcagggaagtgaataaacgagtcgaggatatacatccgactgtcccgaatccctataatctgctgtcaggtctgccaccaagtcatcaatggtatacagtactggacctgaaagacgcgttcttttgtttgcgactgcatcctacgtctcaaccgctgtttgcattcgaatggcgggaccccgaaatggggatttctgggcagctgacatggactcgtcttcctcaagggtttaagaactcccctacacttttcaacgaagccctgcatcgggatttagctgattttagaatccaacatcctgatctgattctcctgcaatatgttgacgatctgctcctcgctgcaaccagtgaacttgattgtcagcagggaacgagagctttactccagactctgggcaatcttggttaccgtgcttcagctaagaaggctcagatatgtcaaaagcaagtgaaataccttggttacctgttgaaggaagggcaacgctggttaaccgaagctcgcaaggaaacagtaatgggccaacccacacccaaaacaccccgccagctgagagaatttctcggtaaggctggattttgcagactgttcattcccggtttcgccgagatggccgcacctctttatccactgacgaagcccggtaccctcttcaactggggacccgatcagcagaaagcttaccaggagattaaacaggcactgctgaccgctcccgcgctcggcctgcccgacctgacgaaaccattcgagcttttcgtggatgagaaacaaggatatgctaagggagtgctgactcagaagcttgggccgtggcgacgcccagtagcttatctcagcaagaaactggatcctgtggccgccggttggccgccatgtttgagaatggttgccgctatcgcagtcctcaccaaagacgccggtaaactgacaatggggcaacctctggtgatcctcgctccgcacgctgtggaagccttagtgaagcagccacctgataggtggttaagcaatgcgagaatgacccattaccaagcgttattgctggataccgatagagtgcaatttggccccgttgtcgctctcaatcccgcgactcttctgcccttaccagaagagggacttcagcataattgtttggacattctcgcagaggctcatggcactcggccagatctcaccgatcaaccccttcctgatgctgatcatacttggtatactgacggctcatccctgctgcaggaaggccaaagaaaagccggcgccgctgtcacaacagaaactgaagtgatttgggccaaggcactccctgcaggaactagcgcccaaagagccgagctcatcgcccttactcaagctctcaaaatggccgagggcaagaaacttaacgtgtacacagactccaggtacgccttcgccacagcacacattcacggcgagatctatcgccgaaggggatggctgacgagtgagggaaaggaaattaagaacaaggatgaaatactggcgctgctgaaggctctgtttctccctaagcggctgtccattattcactgccctggtcaccagaaagggcattccgctgaagccaggggcaataggatggcagatcaggctgcaaggaaagctgcaattaccgaaacgcccgatacgagcacacttcttatcgagaactcttccccttcaggcggtagcaagcggacagcagatggatccgagtttgaatctggcggcagcagcggcggctcaagcggaagtgaaacacctggaacttccgaaagcgctacgcctgaatcttctggtggatcttctggcggatcttccgcatgccagaacaagaagaacgtcgactactacgtcggcctggacatgggagatgcctctgttggatgggccgtgaccgacctgaactacaacatcctgaagttcaacggcaaggccctgtggggcatcagactgttcgattctgccgaaaccgccgctgccagaagaggctttagatctgccaggcggcggatcgacagagtgtcttggagaatctccatgctgcaagagctgttcgccgacgagatcgccaaagtggatgccggcttcttccagcggctgaaggatagcagactgcaggtcgaggacaagcaagagaaaaccgcctacaacctgttcgtgggccagaactacaccgacaaggacttctaccagcagtaccccaccatgtaccacctgagatacgccctggctacacaggccggaccttttgatgtgcggctgctgtatctggccgtgcagcacatcgtgaagcaccggggccactttctgttcgagaacctggacgccagcaaagtgggcgatttcgtggccgtgtttggcgaggtggaaagctacgtgcacgacgagatggaactggacgagtggtactgccacgacatcgatgccctggccaaggtgctgtgcaatgccaatctgggcatcaccgccaagcagaaggccatccagaatctgctgcccgccaagaccaagcaagaaaaggccatcgtgcagctgctgagcggcggaaaggccaagctgtgcgacctgttctgtgacgaggaactggccgaatgcgagaaaaagagcatcagcttccaagaggacaacctcgatgagctggaacccatcctggaagctatcctgcaagagagatacgaggccctgctgcggttcaaggccgtgtatgattggagcctgctggccaagatcctgagactggacgccgacaagaaaagcgagaacgagatgcacctcctgagcgagtgcaaagtgaaggtgtacgaggaacacaagaaagacctggctgtgctgaagtccatgctgaagggcaagcccctgtacaacaagctgttcagacaggacggcgaggacacctacgccaattacgcccagggaatcaaagggatcaaccaggtggacttctgcaagtccctgaagaagcagctggaatctatcggcgagtacaagaaacagatgcagcagctgaccagcttcgaggacgcccagaccgatgtggaaagactgctgtttagagtggccaacggcctggctttccccaagcagaccaccaaggacaacggcatcatcccaatccaggttcacctggccgagctgcagtgtatcctggctcacgccgagaagtacctgcctttcctgaagaacgccgacgccaatggcctgagcgtgcgggaaaagatcacccagatcgtgaagttcagaatcccctactacgtgggacccctggccggcacaagactgtctagagaacagggcagatgctgggtcgagcggagagccgagctgaagaatgagaagatctacccctggaacttcgacaaggtggtggacctggaagcctccgccgagaacttcatcaccaacatgaccgccaagtgcacctacctcgtgggcgaagatgtgctccccaaagagtccctgctgtactccgagttcatggtccgaaacgccctgaacaacctgaccatcgacggcgagagactgcccgtttctctgctgcagaaaatctacaagcagctgttcctggaaaagaccttcaaagtgaccaagaaggccctggaacggttcttcaaacaagagaatgtgtcctaccacgatatcggcggcatcgacgacaagatcaacgcctccatgaaggcctacaacgacttcaagcggatcttcggcgaggcctacatcgaaatgcaccgggatgagatcgagaacatcatccggtggatcaccctgttttgcgacgagaagaagatgctcgagacaaagatccgcaagacgtaccctcagatccccgatgataagatcaaggccattaagaagctgaagtacaaggactggggcagactgagcgccacactgctggattctggcaagatcgcctacgaggatgccagcgtgggcgagagaatcaccatcatctctgccctgcggcacaccaacaagaatttcatggaactgctgagcagcaactgccagtacgacttcatcggcaagattaaggacttcaacggctccaagcagagcgacaatggcaagctgacctacaaggatgtggaagaactgtacgtgtcccctagcgtgaagcggagcatctggcagaccctgaccattctggaagagatcaagaaaatcatgggctgcgagcccaagcgcatcttcatcgagatggccagaagcaaagaggaaagcctgcggaccaacagcaggctgcagagactccaggacctgtacaagaagtgcaaagaagagaacatcgacttcatgcccaaggccgacgagctgaccgacatcagatctcagctccagtgcaagaacgaagaggacctgcggagcgacaagctgtacctgtactacacccagatggggagatgcatgtacaccggcgagaggatcgaactggccagcctgtacgaccagaacaaatacgacgtggacgccatctaccccaggtctaagaccaaggacgacagcctgaacaatcgggtgctcgtgaagaaagagattaacagcgccaagacagacaactaccccatcgacgctgacatccggaagaaaatgcacgccttttggaagatgctgtacgacaagggcttcatcgaccaaaagaagtacgagcggctgaccagaagcacccagctgacagatgaagaactggctggcttcatcaaccggcagctggtggaaaccagacagagcacaaaggccaccgccgacattctgaagtctgcctacgagcacagcgaggtggtgtatgtgaaggccggcaacgtgtccgatttccggcagcagttcgacttcgtgaagtgccgggaagtgaacgacctgcaccacgccaaggacgcctacctgaatatcgtcgtgggcaactgctaccacgtcaagttcaccatcaatccgctgatgttcatccggggcaaccaggacaaccggcggtactctctgaagcccgaggtgttctacgcccacgacattaagcggaacggggagattgcttggctggccggcgataatggcaccatggccacagtgaagagagtgatgcagaaaaacaacgtgctgttcacccggctggccgtggaaggcaaaggcgagctgttcaagcagaaccctctgaaggccaagagcggccagctgcctcttaaagccggcctgagcatcgataagtatggcggctacgactccctgagcaccgcctattttgccctggtggaatccgagggcaagaaaggcgccgtgcagtttacaatcgaggccattcctctggtgtacgccaaacagggcgaagccaccatcaagaaatacctgacagaggtggtgcagctgtgcaagcccgagatcaaagtgatgcggatcaagaagtactccctgctgaagatcaatggcttccccatgcacatctccggcagaaccggaaagcagctgatcttctacgtggccagccagctgtgtatcgacgagaacagcgtggcctatctgaagaaagccctgaagtatgagagcaacctcgaggaaaacgaggccatcctggccgataagaatgccgacgagtccatgaagcagaaagccttcaaccggctcatgttctacaaggacacctggggaatcagcgccgaggctaacctgcagctgtacgatatgctgctggctaagagcgccaacaacctctacaagaacagacccgccagccagaccgccactctgaaagagaagagagagcagttcgccaagctgagcctgagcaagcagatccacgtgatcaaagagatcctgaacctgttcaagtgcgcctccgccagcgccgatttcaagctgcttgataagggcgctgcctgcggcatcctgaaagtgtccaacaacatcaccaagctgaagcagtgcgtgctgatcaatcagagccccaccggcgtgttcgagcaagaggttgacctgatgagactgcctaggggcggcggaggcagctacccctatgatgtacctgattatgcttctggcggacccaagaagaagaggaaagtcggtggttctcctaagaaaaagagaaaggtcggatccggc

SEQ ID NO: 1594-1595 - skipped (2 entries)

SEQ ID NO: 1596 - DNA, 4146 bp, synthetic construct; identical to SEQ ID NO: 1309
  source 1..4146: mol_type = other DNA; note = MG71-2(H883A)_untethered_or_tethered_plasmid

SEQ ID NO: 1597 - DNA, 753 bp, synthetic construct; identical to SEQ ID NO: 1234
  source 1..753: mol_type = other DNA; note = MG160-4_H230R_cloned_into_untethered_tethered_plasmid

SEQ ID NO: 1598 - RNA, 138 nt, synthetic construct
  source 1..138: mol_type = other RNA; note = hPDK1_71-2_RT3_PBS8
  modified_base 1..3: mod_base = OTHER; note = 2'O-methyl ribonucleotide
  modified_base 1..4: mod_base = OTHER; note = phosphorothioate linkage
  modified_base 136..138: mod_base = OTHER; note = 2'O-methyl ribonucleotide
  modified_base 135..138: mod_base = OTHER; note = phosphorothioate linkage
catctgtctgtctgtgggcttcgtttgagagtgagaaatcacgagttcaaaaaacatgatttattcaaaccgtcttcttcggaaggccccacagtgtgtggacagcctctttaaaggaatgaagcccacagttttttt

SEQ ID NO: 1599 - RNA, 140 nt, synthetic construct
  source 1..140: mol_type = other RNA; note = hPDK1_71-2_RT3_PBS10
  modified_base 1..3: mod_base = OTHER; note = 2'O-methyl ribonucleotide
  modified_base 1..4: mod_base = OTHER; note = phosphorothioate linkage
  modified_base 138..140: mod_base = OTHER; note = 2'O-methyl ribonucleotide
  modified_base 137..140: mod_base = OTHER; note = phosphorothioate linkage
catctgtctgtctgtgggcttcgtttgagagtgagaaatcacgagttcaaaaaacatgatttattcaaaccgtcttcttcggaaggccccacagtgtgtggacagcctctttaaaggaatgaagcccacagacttttttt

SEQ ID NO: 1600 - RNA, 143 nt, synthetic construct
  source 1..143: mol_type = other RNA; note = hPDK1_71-2_RT3_PBS13
  modified_base 1..3: mod_base = OTHER; note = 2'O-methyl ribonucleotide
  modified_base 1..4: mod_base = OTHER; note = phosphorothioate linkage
  modified_base 141..143: mod_base = OTHER; note = 2'O-methyl ribonucleotide
  modified_base 140..143: mod_base = OTHER; note = phosphorothioate linkage
catctgtctgtctgtgggcttcgtttgagagtgagaaatcacgagttcaaaaaacatgatttattcaaaccgtcttcttcggaaggccccacagtgtgtggacagcctctttaaaggaatgaagcccacagacagattttttt

SEQ ID NO: 1601 - RNA, 138 nt, synthetic construct
  source 1..138: mol_type = other RNA; note = hPDK1_71-2_RT5_PBS8
  modified_base 1..3: mod_base = OTHER; note = 2'O-methyl ribonucleotide
  modified_base 1..4: mod_base = OTHER; note = phosphorothioate linkage
  modified_base 136..138: mod_base = OTHER; note = 2'O-methyl ribonucleotide
  modified_base 135..138: mod_base = OTHER; note = phosphorothioate linkage
catctgtctgtctgtgggcttcgtttgagagtgagaaatcacgagttcaaaaaacatgatttattcaaaccgtcttcttcggaaggccccacagtgtgtggacagcctctttaatcgaatgaagcccacagttttttt

SEQ ID NO: 1602 - RNA, 140 nt, synthetic construct
  source 1..140: mol_type = other RNA; note = hPDK1_71-2_RT5_PBS10
  modified_base 1..3: mod_base = OTHER; note = 2'O-methyl ribonucleotide
  modified_base 1..4: mod_base = OTHER; note = phosphorothioate linkage
  modified_base 138..140: mod_base = OTHER; note = 2'O-methyl ribonucleotide
  modified_base 137..140: mod_base = OTHER; note = phosphorothioate linkage
catctgtctgtctgtgggcttcgtttgagagtgagaaatcacgagttcaaaaaacatgatttattcaaaccgtcttcttcggaaggccccacagtgtgtggacagcctctttaatcgaatgaagcccacagacttttttt

SEQ ID NO: 1603 - RNA, 143 nt, synthetic construct
  source 1..143: mol_type = other RNA; note = hPDK1_71-2_RT5_PBS13
  modified_base 1..3: mod_base = OTHER; note = 2'O-methyl ribonucleotide
  modified_base 1..4: mod_base = OTHER; note = phosphorothioate linkage
  modified_base 141..143: mod_base = OTHER; note = 2'O-methyl ribonucleotide
  modified_base 140..143: mod_base = OTHER; note = phosphorothioate linkage
catctgtctgtctgtgggcttcgtttgagagtgagaaatcacgagttcaaaaaacatgatttattcaaaccgtcttcttcggaaggccccacagtgtgtggacagcctctttaatcgaatgaagcccacagacagattttttt

SEQ ID NO: 1604 - RNA, 150 nt, synthetic construct
  source 1..150: mol_type = other RNA; note = PAH_R408W_71-2_RT32_PBS8
  modified_base 1..3: mod_base = OTHER; note = 2'O-methyl ribonucleotide
  modified_base 1..4: mod_base = OTHER; note = phosphorothioate linkage
  modified_base 148..150: mod_base = OTHER; note = 2'O-methyl ribonucleotide
  modified_base 147..150: mod_base = OTHER; note = phosphorothioate linkage
atcctttgggtgtatgggtcgtaggtttgagagtgagaaatcacgagttcaaaaaacatgatttattcaaaccgtcttcttcggaaggccccacagtgtgtgggccacaataccttggcccttctccgttcgctacgacccatttttttt

SEQ ID NO: 1605 - RNA, 152 nt, synthetic construct
  source 1..152: mol_type = other RNA; note = PAH_R408W_71-2_RT32_PBS10
  modified_base 1..3: mod_base = OTHER; note = 2'O-methyl ribonucleotide
  modified_base 1..4: mod_base = OTHER; note = phosphorothioate linkage
  modified_base 150..152: mod_base = OTHER; note = 2'O-methyl ribonucleotide
  modified_base 149..152: mod_base = OTHER; note = phosphorothioate linkage
atcctttgggtgtatgggtcgtaggtttgagagtgagaaatcacgagttcaaaaaacatgatttattcaaaccgtcttcttcggaaggccccacagtgtgtgggccacaataccttggcccttctccgttcgctacgacccatacttttttt

SEQ ID NO: 1606 - RNA, 155 nt, synthetic construct
  source 1..155: mol_type = other RNA; note = PAH_R408W_71-2_RT32_PBS13
  modified_base 1..3: mod_base = OTHER; note = 2'O-methyl ribonucleotide
  modified_base 1..4: mod_base = OTHER; note = phosphorothioate linkage
  modified_base 153..155: mod_base = OTHER; note = 2'O-methyl ribonucleotide
  modified_base 152..155: mod_base = OTHER; note = phosphorothioate linkage
atcctttgggtgtatgggtcgtaggtttgagagtgagaaatcacgagttcaaaaaacatgatttattcaaaccgtcttcttcggaaggccccacagtgtgtgggccacaataccttggcccttctccgttcgctacgacccatacaccttttttt

SEQ ID NO: 1607 - RNA, 147 nt, synthetic construct
  source 1..147: mol_type = other RNA; note = PAH_R408W_71-2_RT29_PBS8
  modified_base 1..3: mod_base = OTHER; note = 2'O-methyl ribonucleotide
  modified_base 1..4: mod_base = OTHER; note = phosphorothioate linkage
  modified_base 145..147: mod_base = OTHER; note = 2'O-methyl ribonucleotide
  modified_base 144..147: mod_base = OTHER; note = phosphorothioate linkage
atcctttgggtgtatgggtcgtaggtttgagagtgagaaatcacgagttcaaaaaacatgatttattcaaaccgtcttcttcggaaggccccacagtgtgtggacaataccttggcccttctccgttcgctacgacccatttttttt

SEQ ID NO: 1608 - RNA, 149 nt, synthetic construct
  source 1..149: mol_type = other RNA; note = PAH_R408W_71-2_RT29_PBS10
  modified_base 1..3: mod_base = OTHER; note = 2'O-methyl ribonucleotide
  modified_base 1..4: mod_base = OTHER; note = phosphorothioate linkage
  modified_base 147..149: mod_base = OTHER; note = 2'O-methyl ribonucleotide
  modified_base 146..149: mod_base = OTHER; note = phosphorothioate linkage
atcctttgggtgtatgggtcgtaggtttgagagtgagaaatcacgagttcaaaaaacatgatttattcaaaccgtcttcttcggaaggccccacagtgtgtggacaataccttggcccttctccgttcgctacgacccatacttttttt

SEQ ID NO: 1609 - RNA, 152 nt, synthetic construct
  source 1..152: mol_type = other RNA; note = PAH_R408W_71-2_RT29_PBS13
  modified_base 1..3: mod_base = OTHER; note = 2'O-methyl ribonucleotide
  modified_base 1..4: mod_base = OTHER; note = phosphorothioate linkage
  modified_base 150..152: mod_base = OTHER; note = 2'O-methyl ribonucleotide
  modified_base 149..152: mod_base = OTHER; note = phosphorothioate linkage
atcctttgggtgtatgggtcgtaggtttgagagtgagaaatcacgagttcaaaaaacatgatttattcaaaccgtcttcttcggaaggccccacagtgtgtggacaataccttggcccttctccgttcgctacgacccatacaccttttttt

SEQ ID NO: 1610 - RNA, 135 nt, synthetic construct
  source 1..135: mol_type = other RNA; note = MG71-2_G1_AAVS1_guide
  modified_base 1..3: mod_base = OTHER; note = 2'O-methyl ribonucleotide
  modified_base 1..4: mod_base = OTHER; note = phosphorothioate linkage
  modified_base 133..135: mod_base = OTHER; note = 2'O-methyl ribonucleotide
  modified_base 132..135: mod_base = OTHER; note = phosphorothioate linkage
aatcaaaatcggtgaataggcagagtttgagagtgagaaatcacgagttcaaaaaacatgatttattcaaaccgtcttcttcggaaggccccacagtgtgtggacagtaaagcttgcttcggcaagctttttttt

SEQ ID NO: 1611 - RNA, 135 nt, synthetic construct
  source 1..135: mol_type = other RNA; note = MG71-2_B2_AAVS1_guide
  modified_base 1..3: mod_base = OTHER; note = 2'O-methyl ribonucleotide
  modified_base 1..4: mod_base = OTHER; note = phosphorothioate linkage
  modified_base 133..135: mod_base = OTHER; note = 2'O-methyl ribonucleotide
  modified_base 132..135: mod_base = OTHER; note = phosphorothioate linkage
ctcttggttttacagatacgaaccgtttgagagtgagaaatcacgagttcaaaaaacatgatttattcaaaccgtcttcttcggaaggccccacagtgtgtggacagtaaagcttgcttcggcaagctttttttt

SEQ ID NO: 1612 - RNA, 135 nt, synthetic construct
  source 1..135: mol_type = other RNA; note = MG71-2_C2_AAVS1_guide
  modified_base 1..3: mod_base = OTHER; note = 2'O-methyl ribonucleotide
  modified_base 1..4: mod_base = OTHER; note = phosphorothioate linkage
  modified_base 133..135: mod_base = OTHER; note = 2'O-methyl ribonucleotide
  modified_base 132..135: mod_base = OTHER; note = phosphorothioate linkage
agcgtcatgagcagattaaacccggtttgagagtgagaaatcacgagttcaaaaaacatgatttattcaaaccgtcttcttcggaaggccccacagtgtgtggacagtaaagcttgcttcggcaagctttttttt

SEQ ID NO: 1613 - RNA, 135 nt, synthetic construct
  source 1..135: mol_type = other RNA; note = MG71-2_G2_AAVS1_guide
  modified_base 1..3: mod_base = OTHER; note = 2'O-methyl ribonucleotide
  modified_base 1..4: mod_base = OTHER; note = phosphorothioate linkage
  modified_base 133..135: mod_base = OTHER; note = 2'O-methyl ribonucleotide
  modified_base 132..135: mod_base = OTHER; note = phosphorothioate linkage
cgcacggaggaacaatataaattggtttgagagtgagaaatcacgagttcaaaaaacatgatttattcaaaccgtcttcttcggaaggccccacagtgtgtggacagtaaagcttgcttcggcaagctttttttt

SEQ ID NO: 1614 - RNA, 135 nt, synthetic construct
  source 1..135: mol_type = other RNA; note = MG71-2_D3_AAVS1_guide
  modified_base 1..3: mod_base = OTHER; note = 2'O-methyl ribonucleotide
  modified_base 1..4: mod_base = OTHER; note = phosphorothioate linkage
  modified_base 133..135: mod_base = OTHER; note = 2'O-methyl ribonucleotide
  modified_base 132..135: mod_base = OTHER; note = phosphorothioate linkage
ggtgggggttagacccaatatcaggtttgagagtgagaaatcacgagttcaaaaaacatgatttattcaaaccgtcttcttcggaaggccccacagtgtgtggacagtaaagcttgcttcggcaagctttttttt

SEQ ID NO: 1615 - RNA, 135 nt, synthetic construct
  source 1..135: mol_type = other RNA; note = MG71-2_F3_AAVS1_guide
  modified_base 1..3: mod_base = OTHER; note = 2'O-methyl ribonucleotide
  modified_base 1..4: mod_base = OTHER; note = phosphorothioate linkage
  modified_base 133..135: mod_base = OTHER; note = 2'O-methyl ribonucleotide
  modified_base 132..135: mod_base = OTHER; note = phosphorothioate linkage
cataggggcccgggttggaggaaggtttgagagtgagaaatcacgagttcaaaaaacatgatttattcaaaccgtcttcttcggaaggccccacagtgtgtggacagtaaagcttgcttcggcaagctttttttt

SEQ ID NO: 1616 - RNA, 135 nt, synthetic construct
  source 1..135: mol_type = other RNA; note = MG71-2_G3_AAVS1_guide
  modified_base 1..3: mod_base = OTHER; note = 2'O-methyl ribonucleotide
  modified_base 1..4: mod_base = OTHER; note = phosphorothioate linkage
  modified_base 133..135: mod_base = OTHER; note = 2'O-methyl ribonucleotide
  modified_base 132..135: mod_base = OTHER; note = phosphorothioate linkage
gacagggggctggaagagctagcagtttgagagtgagaaatcacgagttcaaaaaacatgatttattcaaaccgtcttcttcggaaggccccacagtgtgtggacagtaaagcttgcttcggcaagctttttttt

SEQ ID NO: 1617 - RNA, 135 nt, synthetic construct
  source 1..135: mol_type = other RNA; note = MG71-2_H3_AAVS1_guide
  modified_base 1..3: mod_base = OTHER; note = 2'O-methyl ribonucleotide
  modified_base 1..4: mod_base = OTHER; note = phosphorothioate linkage
  modified_base 133..135: mod_base = OTHER; note = 2'O-methyl ribonucleotide
  modified_base 132..135: mod_base = OTHER; note = phosphorothioate linkage
aggtggctaaagccagggagacgggtttgagagtgagaaatcacgagttcaaaaaacatgatttattcaaaccgtcttcttcggaaggccccacagtgtgtggacagtaaagcttgcttcggcaagctttttttt

SEQ ID NO: 1618 - RNA, 135 nt, synthetic construct
  source 1..135: mol_type = other RNA; note = MG71-2_C4_AAVS1_guide
  modified_base 1..3: mod_base = OTHER; note = 2'O-methyl ribonucleotide
  modified_base 1..4: mod_base = OTHER; note = phosphorothioate linkage
  modified_base 133..135: mod_base = OTHER; note = 2'O-methyl ribonucleotide
  modified_base 132..135: mod_base = OTHER; note = phosphorothioate linkage
ccggttaatgtggctctggttctggtttgagagtgagaaatcacgagttcaaaaaacatgatttattcaaaccgtcttcttcggaaggccccacagtgtgtggacagtaaagcttgcttcggcaagctttttttt

SEQ ID NO: 1619 - RNA, 135 nt, synthetic construct
  source 1..135: mol_type = other RNA; note = MG71-2_D4_AAVS1_guide
  modified_base 1..3: mod_base = OTHER; note = 2'O-methyl ribonucleotide
  modified_base 1..4: mod_base = OTHER; note = phosphorothioate linkage
  modified_base 133..135: mod_base = OTHER; note = 2'O-methyl ribonucleotide
  modified_base 132..135: mod_base = OTHER; note = phosphorothioate linkage
ctgtcccctccaccccacagtggggtttgagagtgagaaatcacgagttcaaaaaacatgatttattcaaaccgtcttcttcggaaggccccacagtgtgtggacagtaaagcttgcttcggcaagctttttttt

SEQ ID NO: 1620 - RNA, 135 nt, synthetic construct
  source 1..135: mol_type = other RNA; note = MG71-2_F4_AAVS1_guide
  modified_base 1..3: mod_base = OTHER; note = 2'O-methyl ribonucleotide
  modified_base 1..4: mod_base = OTHER; note = phosphorothioate linkage
  modified_base 133..135: mod_base = OTHER; note = 2'O-methyl ribonucleotide
  modified_base 132..135: mod_base = OTHER; note = phosphorothioate linkage
ctgatcctggtgctgcagcttcctgtttgagagtgagaaatcacgagttcaaaaaacatgatttattcaaaccgtcttcttcggaaggccccacagtgtgtggacagtaaagcttgcttcggcaagctttttttt

SEQ ID NO: 1621 - DNA, 38 bp, synthetic construct
  source 1..38: mol_type = other DNA; note = G1_71-2_forward_NGS_primer
gctcttccgatctnnnnngagatcatgtcctaaccctg

SEQ ID NO: 1622 - DNA, 38 bp, synthetic construct
  source 1..38: mol_type = other DNA; note = G1_71-2_reverse_NGS_primer
gctcttccgatctnnnnngtcagatttgttgctccagg

SEQ ID NO: 1623 - DNA, 246 bp, synthetic construct
  source 1..246: mol_type = other DNA; note = G1_MG71-2_targeted_amplified_ngs
gagatcatgtcctaaccctgatcctcttgtcccacagatatccagaaccctgaccctgccgtgtaccagctgagagactctaaatccagtgacaagtctgtctgcctattcaccgattttgattctcaaacaaatgtgtcacaaagtaaggattctgatgtgtatatcacagacaaaactgtgctagacatgaggtctatggacttcaagagcaacagtgctgtggcctggagcaacaaatctgac

SEQ ID NO: 1624 - DNA, 38 bp, synthetic construct
  source 1..38: mol_type = other DNA; note = B2_71-2_forward_NGS_primer
gctcttccgatctnnnnnctgctctgccttggggaaaa

SEQ ID NO: 1625 - DNA, 38 bp, synthetic construct
  source 1..38: mol_type = other DNA; note = B2_71-2_reverse_NGS_primer
gctcttccgatctnnnnnctaaaccccactcccagctt

SEQ ID NO: 1626 - DNA, 237 bp, synthetic construct
  source 1..237: mol_type = other DNA; note = B2_MG71-2_targeted_amplified_ngs
ctgctctgccttggggaaaaccgtgggtgtgtcctgcaggccatgcaggcctgggacatgcaagcccataaccgctgtggcctcttggttttacagatacgaacctaaactttcaaaacctgtcagtgattgggttccgaatcctcctcctgaaagtggccgggtttaatctgctcatgacgctgcggctgtggtccagctgaggtgaggggccttgaagctgggagtggggtttag

SEQ ID NO: 1627 - DNA, 38 bp, synthetic construct
  source 1..38: mol_type = other DNA; note = C2_71-2_forward_NGS_primer
gctcttccgatctnnnnntgggacatgcaagcccataa

SEQ ID NO: 1628 - DNA, 38 bp, synthetic construct
  source 1..38: mol_type = other DNA; note = C2_71-2_reverse_NGS_primer
gctcttccgatctnnnnntaaaagcaagaccctgcagg

SEQ ID NO: 1629 - DNA, 251 bp, synthetic construct
  source 1..251: mol_type = other DNA; note = C2_MG71-2_targeted_amplified_ngs
tgggacatgcaagcccataaccgctgtggcctcttggttttacagatacgaacctaaactttcaaaacctgtcagtgattgggttccgaatcctcctcctgaaagtggccgggtttaatctgctcatgacgctgcggctgtggtccagctgaggtgaggggccttgaagctgggagtggggtttagggacgcgggtctctgggtgcatcctaagctctgagagcaaacctccctgcagggtcttgctttta

SEQ ID NO: 1630 - DNA, 38 bp, synthetic construct
  source 1..38: mol_type = other DNA; note = G2_71-2_forward_NGS_primer
gctcttccgatctnnnnngcaccattctcacaaaggga

SEQ ID NO: 1631 - DNA, 38 bp, synthetic construct
  source 1..38: mol_type = other DNA; note = G2_71-2_reverse_NGS_primer
gctcttccgatctnnnnngtttcactgatcctggtgct

SEQ ID NO: 1632 - DNA, 250 bp, synthetic construct
  source 1..250: mol_type = other DNA; note = G2_MG71-2_targeted_amplified_ngs
gcaccattctcacaaagggagttttccacacggacacccccctcctcaccacagccctgccaggacggggctggctactggccttatctcacaggtaaaactgacgcacggaggaacaatataaattggggactagaaaggtgaagagccaaagttagaactcaggaccaacttattctgattttgtttttccaaactgcttctcctcttgggaagtgtaaggaagctgcagcaccaggatcagtgaaac

SEQ ID NO: 1633 - DNA, 38 bp, synthetic construct
  source 1..38: mol_type = other DNA; note = D3_71-2_forward_NGS_primer
gctcttccgatctnnnnncaaaccttagaggttctggc

SEQ ID NO: 1634 - DNA, 38 bp, synthetic construct
  source 1..38: mol_type = other DNA; note = D3_71-2_reverse_NGS_primer
gctcttccgatctnnnnngaccaccttatattcccagg

SEQ ID NO: 1635 - DNA, 250 bp, synthetic construct
  source 1..250: mol_type = other DNA; note = D3_MG71-2_targeted_amplified_ngs
caaaccttagaggttctggcaaggagagagatggctccaggaaatgggggtgtgtcaccagataaggaatctgcctaacaggaggtgggggttagacccaatatcaggagactaggaaggaggaggcctaaggatggggcttttctgtcaccaatcctgtccctagtggccccactgtggggtggaggggacagataaaagtacccagaaccagagccacattaaccggccctgggaatataaggtggtc

SEQ ID NO: 1636 - DNA, 38 bp, synthetic construct
  source 1..38: mol_type = other DNA; note = F3_71-2_forward_NGS_primer
gctcttccgatctnnnnnggggacagataaaagtaccc

SEQ ID NO: 1637 - DNA, 38 bp, synthetic construct
  source 1..38: mol_type = other DNA; note = F3_71-2_reverse_NGS_primer
gctcttccgatctnnnnntcctttcatttgggcagctc

SEQ ID NO: 1638 - DNA, 252 bp, synthetic construct
  source 1..252: mol_type = other DNA; note = F3_MG71-2_targeted_amplified_ngs
ggggacagataaaagtacccagaaccagagccacattaaccggccctgggaatataaggtggtcccagctcggggacacaggatccctggaggcagcaaacatgctgtcctgaagtggacataggggcccgggttggaggaagaagactagctgagctctcggacccctggaagatgccatgacagggggctggaagagctagcacagactagagaggtaaggggggtaggggagctgcccaaatgaaagga

SEQ ID NO: 1639 - DNA, 38 bp, synthetic construct
  source 1..38: mol_type = other DNA; note = G3_71-2_forward_NGS_primer
gctcttccgatctnnnnnatataaggtggtcccagctc

SEQ ID NO: 1640 - DNA, 38 bp, synthetic construct
  source 1..38: mol_type = other DNA; note = G3_71-2_reverse_NGS_primer
gctcttccgatctnnnnntgctttctttgcctggacac

SEQ ID NO: 1641 - DNA, 254 bp, synthetic construct
  source 1..254: mol_type = other DNA; note = G3_MG71-2_targeted_amplified_ngs
atataaggtggtcccagctcggggacacaggatccctggaggcagcaaacatgctgtcctgaagtggacataggggcccgggttggaggaagaagactagctgagctctcggacccctggaagatgccatgacagggggctggaagagctagcacagactagagaggtaaggggggtaggggagctgcccaaatgaaaggagtgagaggtgacccgaatccacaggagaacggggtgtccaggcaaagaaagca

SEQ ID NO: 1642 - DNA, 38 bp, synthetic construct
  source 1..38: mol_type = other DNA; note = H3_71-2_forward_NGS_primer
gctcttccgatctnnnnncacagactagagaggtaagg

SEQ ID NO: 1643 - DNA, 38 bp, synthetic construct
  source 1..38: mol_type = other DNA; note = H3_71-2_reverse_NGS_primer
gctcttccgatctnnnnngccatctctcgtttcttagg

SEQ ID NO: 1644 - DNA, 250 bp, synthetic construct
  source 1..250: mol_type = other DNA; note = H3_MG71-2_targeted_amplified_ngs
cacagactagagaggtaaggggggtaggggagctgcccaaatgaaaggagtgagaggtgacccgaatccacaggagaacggggtgtccaggcaaagaaagcaagaggatggagaggtggctaaagccagggagacggggtactttggggttgtccagaaaaacggtgatgatgcaggcctacaagaaggggaggcgggacgcaagggagacatccgtcggagaaggccatcctaagaaacgagagatggc

SEQ ID NO: 1645 - DNA, 38 bp, synthetic construct
  source 1..38: mol_type = other DNA; note = C4_71-2_forward_NGS_primer
gctcttccgatctnnnnngggttagacccaatatcagg

SEQ ID NO: 1646 - DNA, 38 bp, synthetic construct
  source 1..38: mol_type = other DNA; note = C4_71-2_reverse_NGS_primer
gctcttccgatctnnnnngctagtcttcttcctccaac

SEQ ID NO: 1647 - DNA, 250 bp, synthetic construct
  source 1..250: mol_type = other DNA; note = C4_MG71-2_targeted_amplified_ngs
gggttagacccaatatcaggagactaggaaggaggaggcctaaggatggggcttttctgtcaccaatcctgtccctagtggccccactgtggggtggaggggacagataaaagtacccagaaccagagccacattaaccggccctgggaatataaggtggtcccagctcggggacacaggatccctggaggcagcaaacatgctgtcctgaagtggacataggggcccgggttggaggaagaagactagc

SEQ ID NO: 1648 - DNA, 38 bp, synthetic construct
  source 1..38: mol_type = other DNA; note = D4_71-2_forward_NGS_primer
gctcttccgatctnnnnncaccagataaggaatctgcc

SEQ ID NO: 1649 - DNA, 38 bp, synthetic construct
  source 1..38: mol_type = other DNA; note = D4_71-2_reverse_NGS_primer
gctcttccgatctnnnnntccacttcaggacagcatgt

SEQ ID NO: 1650 - DNA, 250 bp, synthetic construct
  source 1..250: mol_type = other DNA; note = D4_MG71-2_targeted_amplified_ngs
caccagataaggaatctgcctaacaggaggtgggggttagacccaatatcaggagactaggaaggaggaggcctaaggatggggcttttctgtcaccaatcctgtccctagtggccccactgtggggtggaggggacagataaaagtacccagaaccagagccacattaaccggccctgggaatataaggtggtcccagctcggggacacaggatccctggaggcagcaaacatgctgtcctgaagtgga

SEQ ID NO: 1651 - DNA, 40 bp, synthetic construct
  source 1..40: mol_type = other DNA; note = F4_71-2_forward_NGS_primer
gctcttccgatctnnnnngccttatctcacaggtaaaact

SEQ ID NO: 1652 - DNA, 38 bp, synthetic construct
  source 1..38: mol_type = other DNA; note = F4_71-2_reverse_NGS_primer
gctcttccgatctnnnnntgacctgcccggttctcagt

SEQ ID NO: 1653 - DNA, 249 bp, synthetic construct
  source 1..249: mol_type = other DNA; note = F4_MG71-2_targeted_amplified_ngs
gccttatctcacaggtaaaactgacgcacggaggaacaatataaattggggactagaaaggtgaagagccaaagttagaactcaggaccaacttattctgattttgtttttccaaactgcttctcctcttgggaagtgtaaggaagctgcagcaccaggatcagtgaaacgcaccagacggccgcgtcagagcagctcaggttctgggagagggtagcgcagggtggccactgagaaccgggcaggtca

SEQ ID NO: 1654 - DNA, 5841 bp, synthetic construct
  source 1..5841: mol_type = other DNA; note = MG151-98(H171N, K297P, delta-166AA)-MG71-2n
atgaagaggaccgctgatggttccgaatttgaatctcctaagaagaaacgaaaggttgacaatattaagcaattatctgtgttgcctggactgtccgaggacccttccgcagtcggcttgcttcaggtgaaagagcagcaggtgcctattgcgactaaggcagttcatcgcagacagtataggacaaatcgggactcattattaccaattcacaaattgatccggcagctggaaagtcagggcgtcatcagcagaacccattcccccttcaacagccccatttggcctgtgaggaaggcctcaggcgaatggcgactgaccgtggactacagggggttgaatgaagtcacccctccgttaagtgcagccgtgccggatatgctggaattgcagtatgagctggaatccaaagcagctaaatggtatgctactatcgacatagccaatgcattcttttccatccctcttgccagggagtgtaggccccagttcgcctttacatggaggggcatccaatatacttggaatcgcctgcctcagggttggaagcatagtcccacaatctgcaacggcctcatccaaactgtgctcgagcaggggagcgcacctgagcacctgcagtacattgacgatattgtggtgtggggcgacaccgccgaggacgtgttcaagaaaggagagcaaattatacagatcttgctgcaggccggcttcgcaatcaaacgaagcaaggtgaaggggcccgctcaggagatccagttcttaggcattaaatggcaggacggccgccgccacatcccagcagatgtcatcgataagatcacagcaatgtcaccccccattaacaaaaaagaaacgcagtcttttctgggcgtagttggattttggaggatgcacgtcccaaactactcccttattgtgtcaccattgtatcaggtgactcgtcccaaaaatgacttcacctggggacctgaacagcagcaggcatttgagcagattaaacatgaaatcgcccgggccgtagcactgggaccggtaaggacaggccaggatgtgaaaaacatcttatacacagctgctggcgaaaaaggtcctacatggagcctgtggcagcgtacttccggtgagactagggggcgccctctcgggttctggagccgggcttaccgggggtccgaggaatgctataccccaactgaaaaagaaatactcgcagcatatgaaggtgtgcgagcggcaagtgaagtggttggaactgagacccagctcttgctggcaccccgcctgccagtgctcaactggatgtttaaggggaaaataccctccacccaccacgcgaccgacgcaacctggtctaagtggattgcactcattacacaacgcgcccggatgggcaacttctccaggccgggcatattggaggtcataatggactggccggagggaaagaaattcgagacctcccctggcgaatctggcggcagcagcggcggctcaagcggaagtgaaacacctggaacttccgaaagcgctacgcctgaatcttctggtggatcttctggcggatcttccgcatgccagaacaagaagaacgtcgactactacgtcggcctggacatgggagatgcctctgttggatgggccgtgaccgacctgaactacaacatcctgaagttcaacggcaaggccctgtggggcatcagactgttcgattctgccgaaaccgccgctgccagaagaggctttagatctgccaggcggcggatcgacagagtgtcttggagaatctccatgctgcaagagctgttcgccgacgagatcgccaaagtggatgccggcttcttccagcggctgaaggatagcagactgcaggtcgaggacaagcaagagaaaaccgcctacaacctgttcgtgggccagaactacaccgacaaggacttctaccagcagtaccccaccatgtaccacctgagatacgccctggctacacaggccggaccttttgatgtgcggctgctgtatctggccgtgcagcacatcgtgaagcaccggggccactttctgttcgagaacctggacgccagcaaagtgggcgatttcgtggccgtgtttggcgaggtggaaagctacgtgcacgacgagatggaactggacgagtggtactgccacgacatcgatgccctggccaaggtgctgtgcaatgccaatctgggcatcaccgccaagcagaaggccatccagaatctgctgcccgccaagaccaagcaagaaaaggccatcgtgcagctgctgagcggcggaaaggccaagctgtgcgacctgttctgtgacgaggaactggccgaatgcgagaaaaagagcatcagcttccaagaggacaacctcgatgagctggaacccatcctggaagctatcctgcaagagagatacgaggccctgctgcggttcaaggccgtgtatgattggagcctgctggccaagatcctgagactggacgccgacaagaaaagcgagaacgagatgcacctcctgagcgagtgcaaagtgaaggtgtacgaggaacacaagaaagacctggctgtgctgaagtccatgctgaagggcaagcccctgtacaacaagctgttcagacaggacggcgaggacacctacgccaattacgcccagggaatcaaagggatcaaccaggtggacttctgcaagtccctgaagaagcagctggaatctatcggcgagtacaagaaacagatgcagcagctgaccagcttcgaggacgcccagaccgatgtggaaagactgctgtttagagtggccaacggcctggctttccccaagcagaccaccaaggacaacggcatcatcccaatccaggttcacctggccgagctgcagtgtatcctggctcacgccgagaagtacctgcctttcctgaagaacgccgacgccaatggcctgagcgtgcgggaaaagatcacccagatcgtgaagttcagaatcccctactacgtgggacccctggccggcacaagactgtctagagaacagggcagatgctgggtcgagcggagagccgagctgaagaatgagaagatctacccctggaacttcgacaaggtggtggacctggaagcctccgccgagaacttcatcaccaacatgaccgccaagtgcacctacctcgtgggcgaagatgtgctccccaaagagtccctgctgtactccgagttcatggtccgaaacgccctgaacaacctgaccatcgacggcgagagactgcccgtttctctgctgcagaaaatctacaagcagctgttcctggaaaagaccttcaaagtgaccaagaaggccctggaacggttcttcaaacaagagaatgtgtcctaccacgatatcggcggcatcgacgacaagatcaacgcctccatgaaggcctacaacgacttcaagcggatcttcggcgaggcctacatcgaaatgcaccgggatgagatcgagaacatcatccggtggatcaccctgttttgcgacgagaagaagatgctcgagacaaagatccgcaagacgtaccctcagatccccgatgataagatcaaggccattaagaagctgaagtacaaggactggggcagactgagcgccacactgctggattctggcaagatcgcctacgaggatgccagcgtgggcgagagaatcaccatcatctctgccctgcggcacaccaacaagaatttcatggaactgctgagcagcaactgccagtacgacttcatcggcaagattaaggacttcaacggctccaagcagagcgacaatggcaagctgacctacaaggatgtggaagaactgtacgtgtcccctagcgtgaagcggagcatctggcagaccctgaccattctggaagagatcaagaaaatcatgggctgcgagcccaagcgcatcttcatcgagatggccagaagcaaagaggaaagcctgcggaccaacagcaggctgcagagactccaggacctgtacaagaagtgcaaagaagagaacatcgacttcatgcccaaggccgacgagctgaccgacatcagatctcagctccagtgcaagaacgaagaggacctgcggagcgacaagctgtacctgtactacacccagatggggagatgcatgtacaccggcgagaggatcgaactggccagcctgtacgaccagaacaaatacgacgtggacgccatctaccccaggtctaagaccaaggacgacagcctgaacaatcgggtgctcgtgaagaaagagattaacagcgccaagacagacaactaccccatcgacgctgacatccggaagaaaatgcacgccttttggaagatgctgtacgacaagggcttcatcgaccaaaagaagtacgagcggctgaccagaagcacccagctgacagatgaagaactggctggcttcatcaaccggcagctggtggaaaccagacagagcacaaaggccaccgccgacattctgaagtctgcctacgagcacagcgaggtggtgtatgtgaaggccggcaacgtgtccgatttccggcagcagttcgacttcgtgaagtgccgggaagtgaacgacctgcaccacgccaaggacgcctacctgaatatcgtcgtgggcaactgctaccacgtcaagttcaccatcaatccgctgatgttcatccggggcaaccaggacaaccggcggtactctctgaagcccgaggtgttctacgcccacgacattaagcggaacggggagattgcttggctggccggcgataatggcaccatggccacagtgaagagagtgatgcagaaaaacaacgtgctgttcacccggctggccgtggaaggcaaaggcgagctgttcaagcagaaccctctgaaggccaagagcggccagctgcctcttaaagccggcctgagcatcgataagtatggcggctacgactccctgagcaccgcctattttgccctggtggaatccgagggcaagaaaggcgccgtgcagtttacaatcgaggccattcctctggtgtacgccaaacagggcgaagccaccatcaagaaatacctgacagaggtggtgcagctgtgcaagcccgagatcaaagtgatgcggatcaagaagtactccctgctgaagatcaatggcttccccatgcacatctccggcagaaccggaaagcagctgatcttctacgtggccagccagctgtgtatcgacgagaacagcgtggcctatctgaagaaagccctgaagtatgagagcaacctcgaggaaaacgaggccatcctggccgataagaatgccgacgagtccatgaagcagaaagccttcaaccggctcatgttctacaaggacacctggggaatcagcgccgaggctaacctgcagctgtacgatatgctgctggctaagagcgccaacaacctctacaagaacagacccgccagccagaccgccactctgaaagagaagagagagcagttcgccaagctgagcctgagcaagcagatccacgtgatcaaagagatcctgaacctgttcaagtgcgcctccgccagcgccgatttcaagctgcttgataagggcgctgcctgcggcatcctgaaagtgtccaacaacatcaccaagctgaagcagtgcgtgctgatcaatcagagccccaccggcgtgttcgagcaagaggttgacctgatgagactgcctaggggcggcggaggcagctacccctatgatgtacctgattatgcttctggcggacccaagaagaagaggaaagtcggtggttctcctaagaaaaagagaaaggtcggatccggc

SEQ ID NO: 1655 - skipped

SEQ ID NO: 1656 - RNA, 158 nt, synthetic construct
  source 1..158: mol_type = other RNA; note = Tw-AVS_D3_38RT_PBS10Bxb71-2
  modified_base 1..3: mod_base = OTHER; note = 2'O-methyl ribonucleotide
  modified_base 1..4: mod_base = OTHER; note = phosphorothioate linkage
  modified_base 156..158: mod_base = OTHER; note = 2'O-methyl ribonucleotide
  modified_base 155..158: mod_base = OTHER; note = phosphorothioate linkage
ggtgggggttagacccaatatcaggtttgagagtgagaaatcacgagttcaaaaaacatgatttattcaaaccgtcttcttcggaaggccccacagtgtgtggggcttgtcgacgacggcggtctccgtcgtcaggatcatatattgggtcttttttt

SEQ ID NO: 1657 - RNA, 161 nt, synthetic construct
  source 1..161: mol_type = other RNA; note = Tw-AVS_D3_38RT_PBS13Bxb71-2
  modified_base 1..3: mod_base = OTHER; note = 2'O-methyl ribonucleotide
  modified_base 1..4: mod_base = OTHER; note = phosphorothioate linkage
  modified_base 159..161: mod_base = OTHER; note = 2'O-methyl ribonucleotide
  modified_base 158..161: mod_base = OTHER; note = phosphorothioate linkage
ggtgggggttagacccaatatcaggtttgagagtgagaaatcacgagttcaaaaaacatgatttattcaaaccgtcttcttcggaaggccccacagtgtgtggggcttgtcgacgacggcggtctccgtcgtcaggatcatatattgggtctaattttttt

SEQ ID NO: 1658 - RNA, 154 nt, synthetic construct
  source 1..154: mol_type = other RNA; note = Tw-AVS_D3_34RT_PBS10Bxb71-2
  modified_base 1..3: mod_base = OTHER; note = 2'O-methyl ribonucleotide
  modified_base 1..4: mod_base = OTHER; note = phosphorothioate linkage
  modified_base 152..154: mod_base = OTHER; note = 2'O-methyl ribonucleotide
  modified_base 151..154: mod_base = OTHER; note = phosphorothioate linkage
ggtgggggttagacccaatatcaggtttgagagtgagaaatcacgagttcaaaaaacatgatttattcaaaccgtcttcttcggaaggccccacagtgtgtggtgtcgacgacggcggtctccgtcgtcaggatcatatattgggtcttttttt

SEQ ID NO: 1659 - RNA, 157 nt, synthetic construct
  source 1..157: mol_type = other RNA; note = Tw-AVS_D3_34RT_PBS13Bxb71-2
  modified_base 1..3: mod_base = OTHER; note = 2'O-methyl ribonucleotide
  modified_base 1..4: mod_base = OTHER; note = phosphorothioate linkage
  modified_base 155..157: mod_base = OTHER; note = 2'O-methyl ribonucleotide
  modified_base 154..157: mod_base = OTHER; note = phosphorothioate linkage
ggtgggggttagacccaatatcaggtttgagagtgagaaatcacgagttcaaaaaacatgatttattcaaaccgtcttcttcggaaggccccacagtgtgtggtgtcgacgacggcggtctccgtcgtcaggatcatatattgggtctaattttttt

SEQ ID NO: 1660 - RNA, 150 nt, synthetic construct
  source 1..150: mol_type = other RNA; note = Tw-AVS_D3_30RT_PBS10Bxb71-2
  modified_base 1..3: mod_base = OTHER; note = 2'O-methyl ribonucleotide
  modified_base 1..4: mod_base = OTHER; note = phosphorothioate linkage
  modified_base 148..150: mod_base = OTHER; note = 2'O-methyl ribonucleotide
  modified_base 147..150: mod_base = OTHER; note = phosphorothioate linkage
ggtgggggttagacccaatatcaggtttgagagtgagaaatcacgagttcaaaaaacatgatttattcaaaccgtcttcttcggaaggccccacagtgtgtgggacgacggcggtctccgtcgtcaggatcatatattgggtcttttttt

SEQ ID NO: 1661 - RNA, 153 nt, synthetic construct
  source 1..153: mol_type = other RNA; note = Tw-AVS_D3_30RT_PBS13Bxb71-2
  modified_base 1..3: mod_base = OTHER; note = 2'O-methyl ribonucleotide
  modified_base 1..4: mod_base = OTHER; note = phosphorothioate linkage
  modified_base 151..153: mod_base = OTHER; note = 2'O-methyl ribonucleotide
  modified_base 150..153: mod_base = OTHER; note = phosphorothioate linkage
ggtgggggttagacccaatatcaggtttgagagtgagaaatcacgagttcaaaaaacatgatttattcaaaccgtcttcttcggaaggccccacagtgtgtgggacgacggcggtctccgtcgtcaggatcatatattgggtctaattttttt

SEQ ID NO: 1662 - RNA, 158 nt, synthetic construct
  source 1..158: mol_type = other RNA; note = Tw-AVS_D4_38RT_PBS10Bxb71-2
  modified_base 1..3: mod_base = OTHER; note = 2'O-methyl ribonucleotide
  modified_base 1..4: mod_base = OTHER; note = phosphorothioate linkage
  modified_base 156..158: mod_base = OTHER; note = 2'O-methyl ribonucleotide
  modified_base 155..158: mod_base = OTHER; note = phosphorothioate linkage
ctgtcccctccaccccacagtggggtttgagagtgagaaatcacgagttcaaaaaacatgatttattcaaaccgtcttcttcggaaggccccacagtgtgtggatgatcctgacgacggagaccgccgtcgtcgacaagccactgtggggtttttttt

SEQ ID NO: 1663 - RNA, 161 nt, synthetic construct
  source 1..161: mol_type = other RNA; note = Tw-AVS_D4_38RT_PBS13Bxb71-2
  modified_base 1..3: mod_base = OTHER; note = 2'O-methyl ribonucleotide
  modified_base 1..4: mod_base = OTHER; note = phosphorothioate linkage
  modified_base 159..161: mod_base = OTHER; note = 2'O-methyl ribonucleotide
  modified_base 158..161: mod_base = OTHER; note = phosphorothioate linkage
ctgtcccctccaccccacagtggggtttgagagtgagaaatcacgagttcaaaaaacatgatttattcaaaccgtcttcttcggaaggccccacagtgtgtggatgatcctgacgacggagaccgccgtcgtcgacaagccactgtggggtggattttttt

SEQ ID NO: 1664 - RNA, 154 nt, synthetic construct
  source 1..154: mol_type = other RNA; note = Tw-AVS_D4_34RT_PBS10Bxb71-2
  modified_base 1..3: mod_base = OTHER; note = 2'O-methyl ribonucleotide
  modified_base 1..4: mod_base = OTHER; note = phosphorothioate linkage
  modified_base 152..154: mod_base = OTHER; note = 2'O-methyl ribonucleotide
  modified_base 151..154: mod_base = OTHER; note = phosphorothioate linkage
ctgtcccctccaccccacagtggggtttgagagtgagaaatcacgagttcaaaaaacatgatttattcaaaccgtcttcttcggaaggccccacagtgtgtggtcctgacgacggagaccgccgtcgtcgacaagccactgtggggtttttttt

SEQ ID NO: 1665 - RNA, 157 nt, synthetic construct
  source 1..157: mol_type = other RNA; note = Tw-AVS_D4_34RT_PBS13Bxb71-2
  modified_base 1..3: mod_base = OTHER; note = 2'O-methyl ribonucleotide
  modified_base 1..4: mod_base = OTHER; note = phosphorothioate linkage
  modified_base 155..157: mod_base = OTHER; note = 2'O-methyl ribonucleotide
  modified_base 154..157: mod_base = OTHER; note = phosphorothioate linkage
ctgtcccctccaccccacagtggggtttgagagtgagaaatcacgagttcaaaaaacatgatttattcaaaccgtcttcttcggaaggccccacagtgtgtggtcctgacgacggagaccgccgtcgtcgacaagccactgtggggtggattttttt

SEQ ID NO: 1666 - RNA, 150 nt, synthetic construct
  source 1..150: mol_type = other RNA; note = Tw-AVS_D4_30RT_PBS10Bxb71-2
  modified_base 1..3: mod_base = OTHER; note = 2'O-methyl ribonucleotide
  modified_base 1..4: mod_base = OTHER; note = phosphorothioate linkage
  modified_base 148..150: mod_base = OTHER; note = 2'O-methyl ribonucleotide
  modified_base 147..150: mod_base = OTHER; note = phosphorothioate linkage
ctgtcccctccaccccacagtggggtttgagagtgagaaatcacgagttcaaaaaacatgatttattcaaaccgtcttcttcggaaggccccacagtgtgtgggacgacggagaccgccgtcgtcgacaagccactgtggggtttttttt

SEQ ID NO: 1667 - RNA, 153 nt, synthetic construct
  source 1..153: mol_type = other RNA; note = Tw-AVS_D4_30RT_PBS13Bxb71-2
  modified_base 1..3: mod_base = OTHER; note = 2'O-methyl ribonucleotide
  modified_base 1..4: mod_base = OTHER; note = phosphorothioate linkage
  modified_base 151..153: mod_base = OTHER; note = 2'O-methyl ribonucleotide
  modified_base 150..153: mod_base = OTHER; note = phosphorothioate linkage
ctgtcccctccaccccacagtggggtttgagagtgagaaatcacgagttcaaaaaacatgatttattcaaaccgtcttcttcggaaggccccacagtgtgtgggacgacggagaccgccgtcgtcgacaagccactgtggggtggattttttt

SEQ ID NO: 1668 - RNA, 173 nt, synthetic construct
  source 1..173: mol_type = other RNA; note = PA-D3-PBS10-AVS-RT15Bxb71-2
  modified_base 1..3: mod_base = OTHER; note = 2'O-methyl ribonucleotide
  modified_base 1..4: mod_base = OTHER; note = phosphorothioate linkage
  modified_base 171..173: mod_base = OTHER; note = 2'O-methyl ribonucleotide
  modified_base 170..173: mod_base = OTHER; note = phosphorothioate linkage
ggtgggggttagacccaatatcaggtttgagagtgagaaatcacgagttcaaaaaacatgatttattcaaaccgtcttcttcggaaggccccacagtgtgtggcctccaccccacagtggcttgtcgacgacggcggtctccgtcgtcaggatcatatattgggtcttttttt

SEQ ID NO: 1669 - RNA, 176 nt, synthetic construct
  source 1..176: mol_type = other RNA; note = PA-D3-PBS13-AVS-RT15Bxb71-2
  modified_base 1..3: mod_base = OTHER; note = 2'O-methyl ribonucleotide
  modified_base 1..4: mod_base = OTHER; note = phosphorothioate linkage
  modified_base 174..176: mod_base = OTHER; note = 2'O-methyl ribonucleotide
  modified_base 173..176: mod_base = OTHER; note = phosphorothioate linkage
ggtgggggttagacccaatatcaggtttgagagtgagaaatcacgagttcaaaaaacatgatttattcaaaccgtcttcttcggaaggccccacagtgtgtggcctccaccccacagtggcttgtcgacgacggcggtctccgtcgtcaggatcatatattgggtctaattttttt

SEQ ID NO: 1670 - RNA, 173 nt, synthetic construct
  source 1..173: mol_type = other RNA; note = PA-D4-PBS10-AVS-RT15Bxb71-2
  modified_base 1..3: mod_base = OTHER; note = 2'O-methyl ribonucleotide
  modified_base 1..4: mod_base = OTHER; note = phosphorothioate linkage
  modified_base 171..173: mod_base = OTHER; note = 2'O-methyl ribonucleotide
  modified_base 170..173: mod_base = OTHER; note = phosphorothioate linkage
ctgtcccctccaccccacagtggggtttgagagtgagaaatcacgagttcaaaaaacatgatttattcaaaccgtcttcttcggaaggccccacagtgtgtggggttagacccaatatatgatcctgacgacggagaccgccgtcgtcgacaagccactgtggggtttttttt

SEQ ID NO: 1671 - RNA, 176 nt, synthetic construct
  source 1..176: mol_type = other RNA; note = PA-D4-PBS13-AVS-RT15Bxb71-2
  modified_base 1..3: mod_base = OTHER; note = 2'O-methyl ribonucleotide
  modified_base 1..4: mod_base = OTHER; note = phosphorothioate linkage
  modified_base 174..176: mod_base = OTHER; note = 2'O-methyl ribonucleotide
  modified_base 173..176: mod_base = OTHER; note = phosphorothioate linkage
ctgtcccctccaccccacagtggggtttgagagtgagaaatcacgagttcaaaaaacatgatttattcaaaccgtcttcttcggaaggccccacagtgtgtggggttagacccaatatatgatcctgacgacggagaccgccgtcgtcgacaagccactgtggggtggattttttt

SEQ ID NO: 1672 - RNA, 183 nt, synthetic construct
  source 1..183: mol_type = other RNA; note = PA-D3-PBS10-AVS-RT25Bxb71-2
  modified_base 1..3: mod_base = OTHER; note = 2'O-methyl ribonucleotide
  modified_base 1..4: mod_base = OTHER; note = phosphorothioate linkage
  modified_base 108..110: mod_base = OTHER; note = 2'O-methyl ribonucleotide
  modified_base 108..111: mod_base = OTHER; note = phosphorothioate linkage
  modified_base 181..183: mod_base = OTHER; note = 2'O-methyl ribonucleotide
  modified_base 180..183: mod_base = OTHER; note = phosphorothioate linkage
ggtgggggttagacccaatatcaggtttgagagtgagaaatcacgagttcaaaaaacatgatttattcaaaccgtcttcttcggaaggccccacagtgtgtggttatctgtcccctccaccccacagtggcttgtcgacgacggcggtctccgtcgtcaggatcatatattgggtcttttttt

SEQ ID NO: 1673 - RNA, 186 nt, synthetic construct
  source 1..186: mol_type = other RNA; note = PA-D3-PBS13-AVS-RT25Bxb71-2
  modified_base 1..3: mod_base = OTHER; note = 2'O-methyl ribonucleotide
  modified_base 1..4: mod_base = OTHER; note = phosphorothioate linkage
  modified_base 108..110: mod_base = OTHER; note = 2'O-methyl ribonucleotide
  modified_base 108..111: mod_base = OTHER; note = phosphorothioate linkage
  modified_base 184..186: mod_base = OTHER; note = 2'O-methyl ribonucleotide
  modified_base 183..186: mod_base = OTHER; note = phosphorothioate linkage
ggtgggggttagacccaatatcaggtttgagagtgagaaatcacgagttcaaaaaacatgatttattcaaaccgtcttcttcggaaggccccacagtgtgtggttatctgtcccctccaccccacagtggcttgtcgacgacggcggtctccgtcgtcaggatcatatattgggtctaattttttt

SEQ ID NO: 1674 - RNA, 183 nt, synthetic construct
  source 1..183: mol_type = other RNA; note = PA-D4-PBS10-AVS-RT25Bxb71-2
  modified_base 1..3: mod_base = OTHER; note = 2'O-methyl ribonucleotide
  modified_base 1..4: mod_base = OTHER; note = phosphorothioate linkage
  modified_base 108..110: mod_base = OTHER; note = 2'O-methyl ribonucleotide
  modified_base 108..111: mod_base = OTHER; note = phosphorothioate linkage
  modified_base 181..183: mod_base = OTHER; note = 2'O-methyl ribonucleotide
  modified_base 180..183: mod_base = OTHER; note = phosphorothioate linkage
ctgtcccctccaccccacagtggggtttgagagtgagaaatcacgagttcaaaaaacatgatttattcaaaccgtcttcttcggaaggccccacagtgtgtggaggaggtgggggttagacccaatatatgatcctgacgacggagaccgccgtcgtcgacaagccactgtggggtttttttt

SEQ ID NO: 1675 - RNA, 186 nt, synthetic construct
  source 1..186: mol_type = other RNA; note = PA-D4-PBS13-AVS-RT25Bxb71-2
  modified_base 1..3: mod_base = OTHER; note = 2'O-methyl ribonucleotide
  modified_base 1..4: mod_base = OTHER; note = phosphorothioate linkage
  modified_base 108..110: mod_base = OTHER; note = 2'O-methyl ribonucleotide
  modified_base 108..111: mod_base = OTHER; note = phosphorothioate linkage
  modified_base 184..186: mod_base = OTHER; note = 2'O-methyl ribonucleotide
  modified_base 183..186: mod_base = OTHER; note = phosphorothioate linkage
ctgtcccctccaccccacagtggggtttgagagtgagaaatcacgagttcaaaaaacatgatttattcaaaccgtcttcttcggaaggccccacagtgtgtggaggaggtgggggttagacccaatatatgatcctgacgacggagaccgccgtcgtcgacaagccactgtggggtggattttttt

SEQ ID NO: 1676 - RNA, 110 nt, synthetic construct
  source 1..110: mol_type = other RNA; note = 71-2-PE-D3-nicking-guide-AVS
  modified_base 1..3: mod_base = OTHER; note = 2'O-methyl ribonucleotide
  modified_base 1..4: mod_base = OTHER; note = phosphorothioate linkage
  modified_base 108..110: mod_base = OTHER; note = 2'O-methyl ribonucleotide
  modified_base 107..110: mod_base = OTHER; note = phosphorothioate linkage
ggtgggggttagacccaatatcaggtttgagagtgagaaatcacgagttcaaaaaacatgatttattcaaaccgtcttcttcggaaggccccacagtgtgtggttttttt

SEQ ID NO: 1677 - RNA, 110 nt, synthetic construct
  source 1..110: mol_type = other RNA; note = 71-2-PE-D4-nicking-guide-AVS
  modified_base 1..3: mod_base = OTHER; note = 2'O-methyl ribonucleotide
  modified_base 1..4: mod_base = OTHER; note = phosphorothioate linkage
  modified_base 108..110: mod_base = OTHER; note = 2'O-methyl ribonucleotide
  modified_base 107..110: mod_base = OTHER; note = phosphorothioate linkage
ctgtcccctccaccccacagtggggtttgagagtgagaaatcacgagttcaaaaaacatgatttattcaaaccgtcttcttcggaaggccccacagtgtgtggttttttt

SEQ ID NO: 1678 - RNA, 168 nt, synthetic construct
  source 1..168: mol_type = other RNA; note = TJ-D3--AVS-PBS10Bxb71-2
  modified_base 1..3: mod_base = OTHER; note = 2'O-methyl ribonucleotide
  modified_base 1..4: mod_base = OTHER; note = phosphorothioate linkage
  modified_base 166..168: mod_base = OTHER; note = 2'O-methyl ribonucleotide
  modified_base 165..168: mod_base = OTHER; note = phosphorothioate linkage
ggtgggggttagacccaatatcaggtttgagagtgagaaatcacgagttcaaaaaacatgatttattcaaaccgtcttcttcggaaggccccacagtgtgtggactgtggggtggcttgtcgacgacggcggtctccgtcgtcaggatcatatattgggtcttttttt

SEQ ID NO: 1679 - RNA, 174 nt, synthetic construct
  source 1..174: mol_type = other RNA; note = TJ-D3--AVS-PBS13Bxb71-2
  modified_base 1..3: mod_base = OTHER; note = 2'O-methyl ribonucleotide
  modified_base 1..4: mod_base = OTHER; note = phosphorothioate linkage
  modified_base 172..174: mod_base = OTHER; note = 2'O-methyl ribonucleotide
  modified_base 171..174: mod_base = OTHER; note = phosphorothioate linkage
ggtgggggttagacccaatatcaggtttgagagtgagaaatcacgagttcaaaaaacatgatttattcaaaccgtcttcttcggaaggccccacagtgtgtggactgtggggtggaggcttgtcgacgacggcggtctccgtcgtcaggatcatatattgggtctaattttttt

SEQ ID NO: 1680 - RNA, 168 nt, synthetic construct
  source 1..168: mol_type = other RNA; note = TJ-D4--AVS-PBS10Bxb71-2
  modified_base 1..3: mod_base = OTHER; note = 2'O-methyl ribonucleotide
  modified_base 1..4: mod_base = OTHER; note = phosphorothioate linkage
  modified_base 166..168: mod_base = OTHER; note = 2'O-methyl ribonucleotide
  modified_base 165..168: mod_base = OTHER; note = phosphorothioate linkage
ctgtcccctccaccccacagtggggtttgagagtgagaaatcacgagttcaaaaaacatgatttattcaaaccgtcttcttcggaaggccccacagtgtgtggatattgggtcatgatcctgacgacggagaccgccgtcgtcgacaagccactgtggggtttttttt

SEQ ID NO: 1681 - RNA, 174 nt, synthetic construct
  source 1..174: mol_type = other RNA; note = TJ-D4--AVS-PBS13Bxb71-2
  modified_base 1..3: mod_base = OTHER; note = 2'O-methyl ribonucleotide
  modified_base 1..4: mod_base = OTHER; note = phosphorothioate linkage
  modified_base 172..174: mod_base = OTHER; note = 2'O-methyl ribonucleotide
  modified_base 171..174: mod_base = OTHER; note = phosphorothioate linkage
ctgtcccctccaccccacagtggggtttgagagtgagaaatcacgagttcaaaaaacatgatttattcaaaccgtcttcttcggaaggccccacagtgtgtggatattgggtctaaatgatcctgacgacggagaccgccgtcgtcgacaagccactgtggggtggattttttt

SEQ ID NO: 1682 - DNA, 21 bp, synthetic construct
  source 1..21: mol_type = other DNA; note = Bxb1_right_end_junction_PCR
ggtctccgtcgtcaggatcat

SEQ ID NO: 1683 - RNA, 136 nt, synthetic construct; identical to SEQ ID NO: 1455
  source 1..136: mol_type = other RNA; note chemically_modified_guide_5nt_change_PBS_8_D2C2_scaffold_AA VS1_71-2_target
  modified_base 1..3: mod_base = OTHER; note = 2'O-methyl ribonucleotide
  modified_base 1..4: mod_base = OTHER; note = phosphorothioate linkage
  modified_base 134..136: mod_base = OTHER; note = 2'O-methyl ribonucleotide
  modified_base 133..136: mod_base = OTHER; note = phosphorothioate linkage

SEQ ID NO: 1684 - RNA, 138 nt, synthetic construct; identical to SEQ ID NO: 1456
  source 1..138: mol_type = other RNA; note chemically_modified_guide_5nt_change_PBS_10_D2C2_scaffold_A AVS1_71-2_target
  modified_base 1..3: mod_base = OTHER; note = 2'O-methyl ribonucleotide
  modified_base 1..4: mod_base = OTHER; note = phosphorothioate linkage
  modified_base 136..138: mod_base = OTHER; note = 2'O-methyl ribonucleotide
  modified_base 135..138: mod_base = OTHER; note = phosphorothioate linkage

SEQ ID NO: 1685 - RNA, 141 nt, synthetic construct; identical to SEQ ID NO: 1457
  source 1..141: mol_type = other RNA; note chemically_modified_guide_5nt_change_PBS_13_D2C2_scaffold_A AVS1_71-2_target
  modified_base 1..3: mod_base = OTHER; note = 2'O-methyl ribonucleotide
  modified_base 1..4: mod_base = OTHER; note = phosphorothioate linkage
  modified_base 139..141: mod_base = OTHER; note = 2'O-methyl ribonucleotide
  modified_base 138..141: mod_base = OTHER; note = phosphorothioate linkage

SEQ ID NO: 1686 - RNA, 144 nt, synthetic construct; identical to SEQ ID NO: 1458
  source 1..144: mol_type = other RNA; note chemically_modified_guide_5nt_change_PBS_16_D2C2_scaffold_A AVS1_71-2_target
  modified_base 1..3: mod_base = OTHER; note = 2'O-methyl ribonucleotide
  modified_base 1..4: mod_base = OTHER; note = phosphorothioate linkage
  modified_base 142..144: mod_base = OTHER; note = 2'O-methyl ribonucleotide
  modified_base 141..144: mod_base = OTHER; note = phosphorothioate linkage

SEQ ID NO: 1687 - RNA, 160 nt, synthetic construct
  source 1..160: mol_type = other RNA; note chemically_modified_guide_24nt-insertion_PBS_8_D2C2_scaffol d_AAVS1_71-2_target
  modified_base 1..3: mod_base = OTHER; note = 2'O-methyl ribonucleotide
  modified_base 1..4: mod_base = OTHER; note = phosphorothioate linkage
  modified_base 157..159: mod_base = OTHER; note = 2'O-methyl ribonucleotide
  modified_base 156..159: mod_base = OTHER; note = phosphorothioate linkage
tctgggagagggtagcgcagggtggtttgagagtgagaaatcacgagttcaaaaaacatgatttattcaaaccgtcttcttcggaaggccccacagtgtgtggtgcccggttctcagtggccaccttatcgtcgtcatccttgtaatccctgcgcttttt

SEQ ID NO: 1688 - RNA, 162 nt, synthetic construct
  source 1..162: mol_type = other RNA; note chemically_modified_guide_24nt-insertion_PBS_10_D2C2_scaffo ld_AAVS1_71-2_target
  modified_base 1..3: mod_base = OTHER; note = 2'O-methyl ribonucleotide
  modified_base 1..4: mod_base = OTHER; note = phosphorothioate linkage
  modified_base 160..162: mod_base = OTHER; note = 2'O-methyl ribonucleotide
  modified_base 159..162: mod_base = OTHER; note = phosphorothioate linkage
tctgggagagggtagcgcagggtggtttgagagtgagaaatcacgagttcaaaaaacatgatttattcaaaccgtcttcttcggaaggccccacagtgtgtggtgcccggttctcagtggccaccttatcgtcgtcatccttgtaatccctgcgctactttt

SEQ ID NO: 1689 - RNA, 165 nt, synthetic construct
  source 1..165: mol_type = other RNA; note chemically_modified_guide_24nt-insertion_PBS_13_D2C2_scaffo ld_AAVS1_71-2_target
  modified_base 1..3: mod_base = OTHER; note = 2'O-methyl ribonucleotide
  modified_base 1..4: mod_base = OTHER; note = phosphorothioate linkage
  modified_base 162..164: mod_base = OTHER; note = 2'O-methyl ribonucleotide
  modified_base 161..164: mod_base = OTHER; note = phosphorothioate linkage
tctgggagagggtagcgcagggtggtttgagagtgagaaatcacgagttcaaaaaacatgatttattcaaaccgtcttcttcggaaggccccacagtgtgtggtgcccggttctcagtggccaccttatcgtcgtcatccttgtaatccctgcgctacccttttt

SEQ ID NO: 1690 - RNA, 168 nt, synthetic construct
  source 1..168: mol_type = other RNA; note chemically_modified_guide_24nt-insertion_PBS_16_D2C2_scaffo ld_AAVS1_71-2_target
  modified_base 1..3: mod_base = OTHER; note = 2'O-methyl ribonucleotide
  modified_base 1..4: mod_base = OTHER; note = phosphorothioate linkage
  modified_base 166..168: mod_base = OTHER; note = 2'O-methyl ribonucleotide
  modified_base 165..168: mod_base = OTHER; note = phosphorothioate linkage
tctgggagagggtagcgcagggtggtttgagagtgagaaatcacgagttcaaaaaacatgatttattcaaaccgtcttcttcggaaggccccacagtgtgtggtgcccggttctcagtggccaccttatcgtcgtcatccttgtaatccctgcgctaccctctctttt

SEQ ID NO: 1691 - DNA, 5223 bp, synthetic construct
  source 1..5223: mol_type = other DNA; note mammalian_codon_optimized_tethered_system_MG160-4_H230R_MG7 1-2n_S311
tgccaagcttccgagctctcgaattcccaccatgaagaggaccgctgatggttccgaatttgaatctcctaagaagaaacgaaaggttcagaacaagaagaacgtcgactactacgtcggcctggacatgggagatgcctctgttggatgggccgtgaccgacctgaactacaacatcctgaagttcaacggcaaggccctgtggggcatcagactgttcgattctgccgaaaccgccgctgccagaagaggctttagatctgccaggcggcggatcgacagagtgtcttggagaatctccatgctgcaagagctgttcgccgacgagatcgccaaagtggatgccggcttcttccagcggctgaaggatagcagactgcaggtcgaggacaagcaagagaaaaccgcctacaacctgttcgtgggccagaactacaccgacaaggacttctaccagcagtaccccaccatgtaccacctgagatacgccctggctacacaggccggaccttttgatgtgcggctgctgtatctggccgtgcagcacatcgtgaagcaccggggccactttctgttcgagaacctggacgccagcaaagtgggcgatttcgtggccgtgtttggcgaggtggaaagctacgtgcacgacgagatggaactggacgagtggtactgccacgacatcgatgccctggccaaggtgctgtgcaatgccaatctgggcatcaccgccaagcagaaggccatccagaatctgctgcccgccaagaccaagcaagaaaaggccatcgtgcagctgctgagcggcggaaaggccaagctgtgcgacctgttctgtgacgaggaactggccgaatgcgagaaaaagagcatcagcttccaagaggacaacctcgatgagctggaacccatcctggaagctatcctgcaagagagatacgaggccctgctgcggttcaaggccgtgtatgattggagcctgctggccaagatcctgagactggacgccgacaagaaaagcggtacctctggcggcagcagcggcggctcaagcggaagtgaaacacctggaacttccgaaagcgctacgcctgaatcttctggtggatcttctggcggatcttccgttacccagaagtggacccatcgataccagttgaaacccggccgatgggtttttgcccccacagatgaggccaagaagtgcggtgctcacattaagcgcagcgtggcttccaggtggaaggccccaaacttctactatcacctcagaaatggcgggcacgttgcggccgtacggtcccacgaactgagccggtttttcttccgggcagatttggacgatttctttgggagagtgaaccggtcccgcgtgacccggtgccttaaaccttggttctcatacgccgaagcaagggagatggcctcagaatctgtcgtgaagcgacctggagagacagcctttgtgctgccgtatgggttcgtgcagagccctatcctcgcatccttggccctggacaagagtaaactgggtagcctgctgagatcactggacgggggccgcgatttcacggtgagcgtctatgtcgacgacatcattatctctggagatgacgaagctcaacttaaagaggtagcatcccgccttgagagagtggcgagtgaggccctgtttccactcagcagtggcaaaactcagggacccgcctctggagtgactgtttttaacatagaactgtcccatagaatgctcaggattaccgatgataggctcgcttcactgaggctcgactatcaggcgactgcatctgagaggtgtaaagctggcatcgtgtcctacgtatacagtgtgaatccagatcaggtcgctcaagtgacaagcggcggcagtagcggcggcagttctggatctgaaacgcctggaacatctgagagcgccacccccgagagcagcggtggatcttctggtgggtcttctggtaccgagaacgagatgcacctcctgagcgagtgcaaagtgaaggtgtacgaggaacacaagaaagacctggctgtgctgaagtccatgctgaagggcaagcccctgtacaacaagctgttcagacaggacggcgaggacacctacgccaattacgcccagggaatcaaagggatcaaccaggtggacttctgcaagtccctgaagaagcagctggaatctatcggcgagtacaagaaacagatgcagcagctgaccagcttcgaggacgcccagaccgatgtggaaagactgctgtttagagtggccaacggcctggctttccccaagcagaccaccaaggacaacggcatcatcccaatccaggttcacctggccgagctgcagtgtatcctggctcacgccgagaagtacctgcctttcctgaagaacgccgacgccaatggcctgagcgtgcgggaaaagatcacccagatcgtgaagttcagaatcccctactacgtgggacccctggccggcacaagactgtctagagaacagggcagatgctgggtcgagcggagagccgagctgaagaatgagaagatctacccctggaacttcgacaaggtggtggacctggaagcctccgccgagaacttcatcaccaacatgaccgccaagtgcacctacctcgtgggcgaagatgtgctccccaaagagtccctgctgtactccgagttcatggtccgaaacgccctgaacaacctgaccatcgacggcgagagactgcccgtttctctgctgcagaaaatctacaagcagctgttcctggaaaagaccttcaaagtgaccaagaaggccctggaacggttcttcaaacaagagaatgtgtcctaccacgatatcggcggcatcgacgacaagatcaacgcctccatgaaggcctacaacgacttcaagcggatcttcggcgaggcctacatcgaaatgcaccgggatgagatcgagaacatcatccggtggatcaccctgttttgcgacgagaagaagatgctcgagacaaagatccgcaagacgtaccctcagatccccgatgataagatcaaggccattaagaagctgaagtacaaggactggggcagactgagcgccacactgctggattctggcaagatcgcctacgaggatgccagcgtgggcgagagaatcaccatcatctctgccctgcggcacaccaacaagaatttcatggaactgctgagcagcaactgccagtacgacttcatcggcaagattaaggacttcaacggctccaagcagagcgacaatggcaagctgacctacaaggatgtggaagaactgtacgtgtcccctagcgtgaagcggagcatctggcagaccctgaccattctggaagagatcaagaaaatcatgggctgcgagcccaagcgcatcttcatcgagatggccagaagcaaagaggaaagcctgcggaccaacagcaggctgcagagactccaggacctgtacaagaagtgcaaagaagagaacatcgacttcatgcccaaggccgacgagctgaccgacatcagatctcagctccagtgcaagaacgaagaggacctgcggagcgacaagctgtacctgtactacacccagatggggagatgcatgtacaccggcgagaggatcgaactggccagcctgtacgaccagaacaaatacgacgtggacgccatctaccccaggtctaagaccaaggacgacagcctgaacaatcgggtgctcgtgaagaaagagattaacagcgccaagacagacaactaccccatcgacgctgacatccggaagaaaatgcacgccttttggaagatgctgtacgacaagggcttcatcgaccaaaagaagtacgagcggctgaccagaagcacccagctgacagatgaagaactggctggcttcatcaaccggcagctggtggaaaccagacagagcacaaaggccaccgccgacattctgaagtctgcctacgagcacagcgaggtggtgtatgtgaaggccggcaacgtgtccgatttccggcagcagttcgacttcgtgaagtgccgggaagtgaacgacctgcaccacgccaaggacgcctacctgaatatcgtcgtgggcaactgctaccacgtcaagttcaccatcaatccgctgatgttcatccggggcaaccaggacaaccggcggtactctctgaagcccgaggtgttctacgcccacgacattaagcggaacggggagattgcttggctggccggcgataatggcaccatggccacagtgaagagagtgatgcagaaaaacaacgtgctgttcacccggctggccgtggaaggcaaaggcgagctgttcaagcagaaccctctgaaggccaagagcggccagctgcctcttaaagccggcctgagcatcgataagtatggcggctacgactccctgagcaccgcctattttgccctggtggaatccgagggcaagaaaggcgccgtgcagtttacaatcgaggccattcctctggtgtacgccaaacagggcgaagccaccatcaagaaatacctgacagaggtggtgcagctgtgcaagcccgagatcaaagtgatgcggatcaagaagtactccctgctgaagatcaatggcttccccatgcacatctccggcagaaccggaaagcagctgatcttctacgtggccagccagctgtgtatcgacgagaacagcgtggcctatctgaagaaagccctgaagtatgagagcaacctcgaggaaaacgaggccatcctggccgataagaatgccgacgagtccatgaagcagaaagccttcaaccggctcatgttctacaaggacacctggggaatcagcgccgaggctaacctgcagctgtacgatatgctgctggctaagagcgccaacaacctctacaagaacagacccgccagccagaccgccactctgaaagagaagagagagcagttcgccaagctgagcctgagcaagcagatccacgtgatcaaagagatcctgaacctgttcaagtgcgcctccgccagcgccgatttcaagctgcttgataagggcgctgcctgcggcatcctgaaagtgtccaacaacatcaccaagctgaagcagtgcgtgctgatcaatcagagccccaccggcgtgttcgagcaagaggttgacctgatgagactgcctaggggcggcggaggcagctaccc

SEQ ID NO: 1692 - DNA, 5223 bp, synthetic construct
  source 1..5223: mol_type = other DNA; note mammalian_codon_optimized_tethered_system_MG160-4_H230R_MG7 1-2n_S355
tgccaagcttccgagctctcgaattcccaccatgaagaggaccgctgatggttccgaatttgaatctcctaagaagaaacgaaaggttcagaacaagaagaacgtcgactactacgtcggcctggacatgggagatgcctctgttggatgggccgtgaccgacctgaactacaacatcctgaagttcaacggcaaggccctgtggggcatcagactgttcgattctgccgaaaccgccgctgccagaagaggctttagatctgccaggcggcggatcgacagagtgtcttggagaatctccatgctgcaagagctgttcgccgacgagatcgccaaagtggatgccggcttcttccagcggctgaaggatagcagactgcaggtcgaggacaagcaagagaaaaccgcctacaacctgttcgtgggccagaactacaccgacaaggacttctaccagcagtaccccaccatgtaccacctgagatacgccctggctacacaggccggaccttttgatgtgcggctgctgtatctggccgtgcagcacatcgtgaagcaccggggccactttctgttcgagaacctggacgccagcaaagtgggcgatttcgtggccgtgtttggcgaggtggaaagctacgtgcacgacgagatggaactggacgagtggtactgccacgacatcgatgccctggccaaggtgctgtgcaatgccaatctgggcatcaccgccaagcagaaggccatccagaatctgctgcccgccaagaccaagcaagaaaaggccatcgtgcagctgctgagcggcggaaaggccaagctgtgcgacctgttctgtgacgaggaactggccgaatgcgagaaaaagagcatcagcttccaagaggacaacctcgatgagctggaacccatcctggaagctatcctgcaagagagatacgaggccctgctgcggttcaaggccgtgtatgattggagcctgctggccaagatcctgagactggacgccgacaagaaaagcgagaacgagatgcacctcctgagcgagtgcaaagtgaaggtgtacgaggaacacaagaaagacctggctgtgctgaagtccatgctgaagggcaagcccctgtacaacaagctgttcagacaggacggcggtacctctggcggcagcagcggcggctcaagcggaagtgaaacacctggaacttccgaaagcgctacgcctgaatcttctggtggatcttctggcggatcttccgttacccagaagtggacccatcgataccagttgaaacccggccgatgggtttttgcccccacagatgaggccaagaagtgcggtgctcacattaagcgcagcgtggcttccaggtggaaggccccaaacttctactatcacctcagaaatggcgggcacgttgcggccgtacggtcccacgaactgagccggtttttcttccgggcagatttggacgatttctttgggagagtgaaccggtcccgcgtgacccggtgccttaaaccttggttctcatacgccgaagcaagggagatggcctcagaatctgtcgtgaagcgacctggagagacagcctttgtgctgccgtatgggttcgtgcagagccctatcctcgcatccttggccctggacaagagtaaactgggtagcctgctgagatcactggacgggggccgcgatttcacggtgagcgtctatgtcgacgacatcattatctctggagatgacgaagctcaacttaaagaggtagcatcccgccttgagagagtggcgagtgaggccctgtttccactcagcagtggcaaaactcagggacccgcctctggagtgactgtttttaacatagaactgtcccatagaatgctcaggattaccgatgataggctcgcttcactgaggctcgactatcaggcgactgcatctgagaggtgtaaagctggcatcgtgtcctacgtatacagtgtgaatccagatcaggtcgctcaagtgacaagcggcggcagtagcggcggcagttctggatctgaaacgcctggaacatctgagagcgccacccccgagagcagcggtggatcttctggtgggtcttctggtaccgaggacacctacgccaattacgcccagggaatcaaagggatcaaccaggtggacttctgcaagtccctgaagaagcagctggaatctatcggcgagtacaagaaacagatgcagcagctgaccagcttcgaggacgcccagaccgatgtggaaagactgctgtttagagtggccaacggcctggctttccccaagcagaccaccaaggacaacggcatcatcccaatccaggttcacctggccgagctgcagtgtatcctggctcacgccgagaagtacctgcctttcctgaagaacgccgacgccaatggcctgagcgtgcgggaaaagatcacccagatcgtgaagttcagaatcccctactacgtgggacccctggccggcacaagactgtctagagaacagggcagatgctgggtcgagcggagagccgagctgaagaatgagaagatctacccctggaacttcgacaaggtggtggacctggaagcctccgccgagaacttcatcaccaacatgaccgccaagtgcacctacctcgtgggcgaagatgtgctccccaaagagtccctgctgtactccgagttcatggtccgaaacgccctgaacaacctgaccatcgacggcgagagactgcccgtttctctgctgcagaaaatctacaagcagctgttcctggaaaagaccttcaaagtgaccaagaaggccctggaacggttcttcaaacaagagaatgtgtcctaccacgatatcggcggcatcgacgacaagatcaacgcctccatgaaggcctacaacgacttcaagcggatcttcggcgaggcctacatcgaaatgcaccgggatgagatcgagaacatcatccggtggatcaccctgttttgcgacgagaagaagatgctcgagacaaagatccgcaagacgtaccctcagatccccgatgataagatcaaggccattaagaagctgaagtacaaggactggggcagactgagcgccacactgctggattctggcaagatcgcctacgaggatgccagcgtgggcgagagaatcaccatcatctctgccctgcggcacaccaacaagaatttcatggaactgctgagcagcaactgccagtacgacttcatcggcaagattaaggacttcaacggctccaagcagagcgacaatggcaagctgacctacaaggatgtggaagaactgtacgtgtcccctagcgtgaagcggagcatctggcagaccctgaccattctggaagagatcaagaaaatcatgggctgcgagcccaagcgcatcttcatcgagatggccagaagcaaagaggaaagcctgcggaccaacagcaggctgcagagactccaggacctgtacaagaagtgcaaagaagagaacatcgacttcatgcccaaggccgacgagctgaccgacatcagatctcagctccagtgcaagaacgaagaggacctgcggagcgacaagctgtacctgtactacacccagatggggagatgcatgtacaccggcgagaggatcgaactggccagcctgtacgaccagaacaaatacgacgtggacgccatctaccccaggtctaagaccaaggacgacagcctgaacaatcgggtgctcgtgaagaaagagattaacagcgccaagacagacaactaccccatcgacgctgacatccggaagaaaatgcacgccttttggaagatgctgtacgacaagggcttcatcgaccaaaagaagtacgagcggctgaccagaagcacccagctgacagatgaagaactggctggcttcatcaaccggcagctggtggaaaccagacagagcacaaaggccaccgccgacattctgaagtctgcctacgagcacagcgaggtggtgtatgtgaaggccggcaacgtgtccgatttccggcagcagttcgacttcgtgaagtgccgggaagtgaacgacctgcaccacgccaaggacgcctacctgaatatcgtcgtgggcaactgctaccacgtcaagttcaccatcaatccgctgatgttcatccggggcaaccaggacaaccggcggtactctctgaagcccgaggtgttctacgcccacgacattaagcggaacggggagattgcttggctggccggcgataatggcaccatggccacagtgaagagagtgatgcagaaaaacaacgtgctgttcacccggctggccgtggaaggcaaaggcgagctgttcaagcagaaccctctgaaggccaagagcggccagctgcctcttaaagccggcctgagcatcgataagtatggcggctacgactccctgagcaccgcctattttgccctggtggaatccgagggcaagaaaggcgccgtgcagtttacaatcgaggccattcctctggtgtacgccaaacagggcgaagccaccatcaagaaatacctgacagaggtggtgcagctgtgcaagcccgagatcaaagtgatgcggatcaagaagtactccctgctgaagatcaatggcttccccatgcacatctccggcagaaccggaaagcagctgatcttctacgtggccagccagctgtgtatcgacgagaacagcgtggcctatctgaagaaagccctgaagtatgagagcaacctcgaggaaaacgaggccatcctggccgataagaatgccgacgagtccatgaagcagaaagccttcaaccggctcatgttctacaaggacacctggggaatcagcgccgaggctaacctgcagctgtacgatatgctgctggctaagagcgccaacaacctctacaagaacagacccgccagccagaccgccactctgaaagagaagagagagcagttcgccaagctgagcctgagcaagcagatccacgtgatcaaagagatcctgaacctgttcaagtgcgcctccgccagcgccgatttcaagctgcttgataagggcgctgcctgcggcatcctgaaagtgtccaacaacatcaccaagctgaagcagtgcgtgctgatcaatcagagccccaccggcgtgttcgagcaagaggttgacctgatgagactgcctaggggcggcggaggcagctaccc

SEQ ID NO: 1693 - DNA, 5223 bp, synthetic construct
  source 1..5223: mol_type = other DNA; note mammalian_codon_optimized_tethered_system_MG160-4_H230R_MG7 1-2n_S396
tgccaagcttccgagctctcgaattcccaccatgaagaggaccgctgatggttccgaatttgaatctcctaagaagaaacgaaaggttcagaacaagaagaacgtcgactactacgtcggcctggacatgggagatgcctctgttggatgggccgtgaccgacctgaactacaacatcctgaagttcaacggcaaggccctgtggggcatcagactgttcgattctgccgaaaccgccgctgccagaagaggctttagatctgccaggcggcggatcgacagagtgtcttggagaatctccatgctgcaagagctgttcgccgacgagatcgccaaagtggatgccggcttcttccagcggctgaaggatagcagactgcaggtcgaggacaagcaagagaaaaccgcctacaacctgttcgtgggccagaactacaccgacaaggacttctaccagcagtaccccaccatgtaccacctgagatacgccctggctacacaggccggaccttttgatgtgcggctgctgtatctggccgtgcagcacatcgtgaagcaccggggccactttctgttcgagaacctggacgccagcaaagtgggcgatttcgtggccgtgtttggcgaggtggaaagctacgtgcacgacgagatggaactggacgagtggtactgccacgacatcgatgccctggccaaggtgctgtgcaatgccaatctgggcatcaccgccaagcagaaggccatccagaatctgctgcccgccaagaccaagcaagaaaaggccatcgtgcagctgctgagcggcggaaaggccaagctgtgcgacctgttctgtgacgaggaactggccgaatgcgagaaaaagagcatcagcttccaagaggacaacctcgatgagctggaacccatcctggaagctatcctgcaagagagatacgaggccctgctgcggttcaaggccgtgtatgattggagcctgctggccaagatcctgagactggacgccgacaagaaaagcgagaacgagatgcacctcctgagcgagtgcaaagtgaaggtgtacgaggaacacaagaaagacctggctgtgctgaagtccatgctgaagggcaagcccctgtacaacaagctgttcagacaggacggcgaggacacctacgccaattacgcccagggaatcaaagggatcaaccaggtggacttctgcaagtccctgaagaagcagctggaatctatcggcgagtacaagaaacagatgcagcagctgaccggtacctctggcggcagcagcggcggctcaagcggaagtgaaacacctggaacttccgaaagcgctacgcctgaatcttctggtggatcttctggcggatcttccgttacccagaagtggacccatcgataccagttgaaacccggccgatgggtttttgcccccacagatgaggccaagaagtgcggtgctcacattaagcgcagcgtggcttccaggtggaaggccccaaacttctactatcacctcagaaatggcgggcacgttgcggccgtacggtcccacgaactgagccggtttttcttccgggcagatttggacgatttctttgggagagtgaaccggtcccgcgtgacccggtgccttaaaccttggttctcatacgccgaagcaagggagatggcctcagaatctgtcgtgaagcgacctggagagacagcctttgtgctgccgtatgggttcgtgcagagccctatcctcgcatccttggccctggacaagagtaaactgggtagcctgctgagatcactggacgggggccgcgatttcacggtgagcgtctatgtcgacgacatcattatctctggagatgacgaagctcaacttaaagaggtagcatcccgccttgagagagtggcgagtgaggccctgtttccactcagcagtggcaaaactcagggacccgcctctggagtgactgtttttaacatagaactgtcccatagaatgctcaggattaccgatgataggctcgcttcactgaggctcgactatcaggcgactgcatctgagaggtgtaaagctggcatcgtgtcctacgtatacagtgtgaatccagatcaggtcgctcaagtgacaagcggcggcagtagcggcggcagttctggatctgaaacgcctggaacatctgagagcgccacccccgagagcagcggtggatcttctggtgggtcttctggtaccagcttcgaggacgcccagaccgatgtggaaagactgctgtttagagtggccaacggcctggctttccccaagcagaccaccaaggacaacggcatcatcccaatccaggttcacctggccgagctgcagtgtatcctggctcacgccgagaagtacctgcctttcctgaagaacgccgacgccaatggcctgagcgtgcgggaaaagatcacccagatcgtgaagttcagaatcccctactacgtgggacccctggccggcacaagactgtctagagaacagggcagatgctgggtcgagcggagagccgagctgaagaatgagaagatctacccctggaacttcgacaaggtggtggacctggaagcctccgccgagaacttcatcaccaacatgaccgccaagtgcacctacctcgtgggcgaagatgtgctccccaaagagtccctgctgtactccgagttcatggtccgaaacgccctgaacaacctgaccatcgacggcgagagactgcccgtttctctgctgcagaaaatctacaagcagctgttcctggaaaagaccttcaaagtgaccaagaaggccctggaacggttcttcaaacaagagaatgtgtcctaccacgatatcggcggcatcgacgacaagatcaacgcctccatgaaggcctacaacgacttcaagcggatcttcggcgaggcctacatcgaaatgcaccgggatgagatcgagaacatcatccggtggatcaccctgttttgcgacgagaagaagatgctcgagacaaagatccgcaagacgtaccctcagatccccgatgataagatcaaggccattaagaagctgaagtacaaggactggggcagactgagcgccacactgctggattctggcaagatcgcctacgaggatgccagcgtgggcgagagaatcaccatcatctctgccctgcggcacaccaacaagaatttcatggaactgctgagcagcaactgccagtacgacttcatcggcaagattaaggacttcaacggctccaagcagagcgacaatggcaagctgacctacaaggatgtggaagaactgtacgtgtcccctagcgtgaagcggagcatctggcagaccctgaccattctggaagagatcaagaaaatcatgggctgcgagcccaagcgcatcttcatcgagatggccagaagcaaagaggaaagcctgcggaccaacagcaggctgcagagactccaggacctgtacaagaagtgcaaagaagagaacatcgacttcatgcccaaggccgacgagctgaccgacatcagatctcagctccagtgcaagaacgaagaggacctgcggagcgacaagctgtacctgtactacacccagatggggagatgcatgtacaccggcgagaggatcgaactggccagcctgtacgaccagaacaaatacgacgtggacgccatctaccccaggtctaagaccaaggacgacagcctgaacaatcgggtgctcgtgaagaaagagattaacagcgccaagacagacaactaccccatcgacgctgacatccggaagaaaatgcacgccttttggaagatgctgtacgacaagggcttcatcgaccaaaagaagtacgagcggctgaccagaagcacccagctgacagatgaagaactggctggcttcatcaaccggcagctggtggaaaccagacagagcacaaaggccaccgccgacattctgaagtctgcctacgagcacagcgaggtggtgtatgtgaaggccggcaacgtgtccgatttccggcagcagttcgacttcgtgaagtgccgggaagtgaacgacctgcaccacgccaaggacgcctacctgaatatcgtcgtgggcaactgctaccacgtcaagttcaccatcaatccgctgatgttcatccggggcaaccaggacaaccggcggtactctctgaagcccgaggtgttctacgcccacgacattaagcggaacggggagattgcttggctggccggcgataatggcaccatggccacagtgaagagagtgatgcagaaaaacaacgtgctgttcacccggctggccgtggaaggcaaaggcgagctgttcaagcagaaccctctgaaggccaagagcggccagctgcctcttaaagccggcctgagcatcgataagtatggcggctacgactccctgagcaccgcctattttgccctggtggaatccgagggcaagaaaggcgccgtgcagtttacaatcgaggccattcctctggtgtacgccaaacagggcgaagccaccatcaagaaatacctgacagaggtggtgcagctgtgcaagcccgagatcaaagtgatgcggatcaagaagtactccctgctgaagatcaatggcttccccatgcacatctccggcagaaccggaaagcagctgatcttctacgtggccagccagctgtgtatcgacgagaacagcgtggcctatctgaagaaagccctgaagtatgagagcaacctcgaggaaaacgaggccatcctggccgataagaatgccgacgagtccatgaagcagaaagccttcaaccggctcatgttctacaaggacacctggggaatcagcgccgaggctaacctgcagctgtacgatatgctgctggctaagagcgccaacaacctctacaagaacagacccgccagccagaccgccactctgaaagagaagagagagcagttcgccaagctgagcctgagcaagcagatccacgtgatcaaagagatcctgaacctgttcaagtgcgcctccgccagcgccgatttcaagctgcttgataagggcgctgcctgcggcatcctgaaagtgtccaacaacatcaccaagctgaagcagtgcgtgctgatcaatcagagccccaccggcgtgttcgagcaagaggttgacctgatgagactgcctaggggcggcggaggcagctaccc

SEQ ID NO: 1694 - DNA, 5223 bp, synthetic construct
  source 1..5223: mol_type = other DNA; note mammalian_codon_optimized_tethered_system_MG160-4_H230R_MG7 1-2n_I822
tgccaagcttccgagctctcgaattcccaccatgaagaggaccgctgatggttccgaatttgaatctcctaagaagaaacgaaaggttcagaacaagaagaacgtcgactactacgtcggcctggacatgggagatgcctctgttggatgggccgtgaccgacctgaactacaacatcctgaagttcaacggcaaggccctgtggggcatcagactgttcgattctgccgaaaccgccgctgccagaagaggctttagatctgccaggcggcggatcgacagagtgtcttggagaatctccatgctgcaagagctgttcgccgacgagatcgccaaagtggatgccggcttcttccagcggctgaaggatagcagactgcaggtcgaggacaagcaagagaaaaccgcctacaacctgttcgtgggccagaactacaccgacaaggacttctaccagcagtaccccaccatgtaccacctgagatacgccctggctacacaggccggaccttttgatgtgcggctgctgtatctggccgtgcagcacatcgtgaagcaccggggccactttctgttcgagaacctggacgccagcaaagtgggcgatttcgtggccgtgtttggcgaggtggaaagctacgtgcacgacgagatggaactggacgagtggtactgccacgacatcgatgccctggccaaggtgctgtgcaatgccaatctgggcatcaccgccaagcagaaggccatccagaatctgctgcccgccaagaccaagcaagaaaaggccatcgtgcagctgctgagcggcggaaaggccaagctgtgcgacctgttctgtgacgaggaactggccgaatgcgagaaaaagagcatcagcttccaagaggacaacctcgatgagctggaacccatcctggaagctatcctgcaagagagatacgaggccctgctgcggttcaaggccgtgtatgattggagcctgctggccaagatcctgagactggacgccgacaagaaaagcgagaacgagatgcacctcctgagcgagtgcaaagtgaaggtgtacgaggaacacaagaaagacctggctgtgctgaagtccatgctgaagggcaagcccctgtacaacaagctgttcagacaggacggcgaggacacctacgccaattacgcccagggaatcaaagggatcaaccaggtggacttctgcaagtccctgaagaagcagctggaatctatcggcgagtacaagaaacagatgcagcagctgaccagcttcgaggacgcccagaccgatgtggaaagactgctgtttagagtggccaacggcctggctttccccaagcagaccaccaaggacaacggcatcatcccaatccaggttcacctggccgagctgcagtgtatcctggctcacgccgagaagtacctgcctttcctgaagaacgccgacgccaatggcctgagcgtgcgggaaaagatcacccagatcgtgaagttcagaatcccctactacgtgggacccctggccggcacaagactgtctagagaacagggcagatgctgggtcgagcggagagccgagctgaagaatgagaagatctacccctggaacttcgacaaggtggtggacctggaagcctccgccgagaacttcatcaccaacatgaccgccaagtgcacctacctcgtgggcgaagatgtgctccccaaagagtccctgctgtactccgagttcatggtccgaaacgccctgaacaacctgaccatcgacggcgagagactgcccgtttctctgctgcagaaaatctacaagcagctgttcctggaaaagaccttcaaagtgaccaagaaggccctggaacggttcttcaaacaagagaatgtgtcctaccacgatatcggcggcatcgacgacaagatcaacgcctccatgaaggcctacaacgacttcaagcggatcttcggcgaggcctacatcgaaatgcaccgggatgagatcgagaacatcatccggtggatcaccctgttttgcgacgagaagaagatgctcgagacaaagatccgcaagacgtaccctcagatccccgatgataagatcaaggccattaagaagctgaagtacaaggactggggcagactgagcgccacactgctggattctggcaagatcgcctacgaggatgccagcgtgggcgagagaatcaccatcatctctgccctgcggcacaccaacaagaatttcatggaactgctgagcagcaactgccagtacgacttcatcggcaagattaaggacttcaacggctccaagcagagcgacaatggcaagctgacctacaaggatgtggaagaactgtacgtgtcccctagcgtgaagcggagcatctggcagaccctgaccattctggaagagatcaagaaaatcatgggctgcgagcccaagcgcatcttcatcgagatggccagaagcaaagaggaaagcctgcggaccaacagcaggctgcagagactccaggacctgtacaagaagtgcaaagaagagaacatcggtacctctggcggcagcagcggcggctcaagcggaagtgaaacacctggaacttccgaaagcgctacgcctgaatcttctggtggatcttctggcggatcttccgttacccagaagtggacccatcgataccagttgaaacccggccgatgggtttttgcccccacagatgaggccaagaagtgcggtgctcacattaagcgcagcgtggcttccaggtggaaggccccaaacttctactatcacctcagaaatggcgggcacgttgcggccgtacggtcccacgaactgagccggtttttcttccgggcagatttggacgatttctttgggagagtgaaccggtcccgcgtgacccggtgccttaaaccttggttctcatacgccgaagcaagggagatggcctcagaatctgtcgtgaagcgacctggagagacagcctttgtgctgccgtatgggttcgtgcagagccctatcctcgcatccttggccctggacaagagtaaactgggtagcctgctgagatcactggacgggggccgcgatttcacggtgagcgtctatgtcgacgacatcattatctctggagatgacgaagctcaacttaaagaggtagcatcccgccttgagagagtggcgagtgaggccctgtttccactcagcagtggcaaaactcagggacccgcctctggagtgactgtttttaacatagaactgtcccatagaatgctcaggattaccgatgataggctcgcttcactgaggctcgactatcaggcgactgcatctgagaggtgtaaagctggcatcgtgtcctacgtatacagtgtgaatccagatcaggtcgctcaagtgacaagcggcggcagtagcggcggcagttctggatctgaaacgcctggaacatctgagagcgccacccccgagagcagcggtggatcttctggtgggtcttctggtaccgacttcatgcccaaggccgacgagctgaccgacatcagatctcagctccagtgcaagaacgaagaggacctgcggagcgacaagctgtacctgtactacacccagatggggagatgcatgtacaccggcgagaggatcgaactggccagcctgtacgaccagaacaaatacgacgtggacgccatctaccccaggtctaagaccaaggacgacagcctgaacaatcgggtgctcgtgaagaaagagattaacagcgccaagacagacaactaccccatcgacgctgacatccggaagaaaatgcacgccttttggaagatgctgtacgacaagggcttcatcgaccaaaagaagtacgagcggctgaccagaagcacccagctgacagatgaagaactggctggcttcatcaaccggcagctggtggaaaccagacagagcacaaaggccaccgccgacattctgaagtctgcctacgagcacagcgaggtggtgtatgtgaaggccggcaacgtgtccgatttccggcagcagttcgacttcgtgaagtgccgggaagtgaacgacctgcaccacgccaaggacgcctacctgaatatcgtcgtgggcaactgctaccacgtcaagttcaccatcaatccgctgatgttcatccggggcaaccaggacaaccggcggtactctctgaagcccgaggtgttctacgcccacgacattaagcggaacggggagattgcttggctggccggcgataatggcaccatggccacagtgaagagagtgatgcagaaaaacaacgtgctgttcacccggctggccgtggaaggcaaaggcgagctgttcaagcagaaccctctgaaggccaagagcggccagctgcctcttaaagccggcctgagcatcgataagtatggcggctacgactccctgagcaccgcctattttgccctggtggaatccgagggcaagaaaggcgccgtgcagtttacaatcgaggccattcctctggtgtacgccaaacagggcgaagccaccatcaagaaatacctgacagaggtggtgcagctgtgcaagcccgagatcaaagtgatgcggatcaagaagtactccctgctgaagatcaatggcttccccatgcacatctccggcagaaccggaaagcagctgatcttctacgtggccagccagctgtgtatcgacgagaacagcgtggcctatctgaagaaagccctgaagtatgagagcaacctcgaggaaaacgaggccatcctggccgataagaatgccgacgagtccatgaagcagaaagccttcaaccggctcatgttctacaaggacacctggggaatcagcgccgaggctaacctgcagctgtacgatatgctgctggctaagagcgccaacaacctctacaagaacagacccgccagccagaccgccactctgaaagagaagagagagcagttcgccaagctgagcctgagcaagcagatccacgtgatcaaagagatcctgaacctgttcaagtgcgcctccgccagcgccgatttcaagctgcttgataagggcgctgcctgcggcatcctgaaagtgtccaacaacatcaccaagctgaagcagtgcgtgctgatcaatcagagccccaccggcgtgttcgagcaagaggttgacctgatgagactgcctaggggcggcggaggcagctaccc

SEQ ID NO: 1695 - DNA, 5223 bp, synthetic construct
  source 1..5223: mol_type = other DNA; note mammalian_codon_optimized_tethered_system_MG160-4_H230R_MG7 1-2n_V1176
tgccaagcttccgagctctcgaattcccaccatgaagaggaccgctgatggttccgaatttgaatctcctaagaagaaacgaaaggttcagaacaagaagaacgtcgactactacgtcggcctggacatgggagatgcctctgttggatgggccgtgaccgacctgaactacaacatcctgaagttcaacggcaaggccctgtggggcatcagactgttcgattctgccgaaaccgccgctgccagaagaggctttagatctgccaggcggcggatcgacagagtgtcttggagaatctccatgctgcaagagctgttcgccgacgagatcgccaaagtggatgccggcttcttccagcggctgaaggatagcagactgcaggtcgaggacaagcaagagaaaaccgcctacaacctgttcgtgggccagaactacaccgacaaggacttctaccagcagtaccccaccatgtaccacctgagatacgccctggctacacaggccggaccttttgatgtgcggctgctgtatctggccgtgcagcacatcgtgaagcaccggggccactttctgttcgagaacctggacgccagcaaagtgggcgatttcgtggccgtgtttggcgaggtggaaagctacgtgcacgacgagatggaactggacgagtggtactgccacgacatcgatgccctggccaaggtgctgtgcaatgccaatctgggcatcaccgccaagcagaaggccatccagaatctgctgcccgccaagaccaagcaagaaaaggccatcgtgcagctgctgagcggcggaaaggccaagctgtgcgacctgttctgtgacgaggaactggccgaatgcgagaaaaagagcatcagcttccaagaggacaacctcgatgagctggaacccatcctggaagctatcctgcaagagagatacgaggccctgctgcggttcaaggccgtgtatgattggagcctgctggccaagatcctgagactggacgccgacaagaaaagcgagaacgagatgcacctcctgagcgagtgcaaagtgaaggtgtacgaggaacacaagaaagacctggctgtgctgaagtccatgctgaagggcaagcccctgtacaacaagctgttcagacaggacggcgaggacacctacgccaattacgcccagggaatcaaagggatcaaccaggtggacttctgcaagtccctgaagaagcagctggaatctatcggcgagtacaagaaacagatgcagcagctgaccagcttcgaggacgcccagaccgatgtggaaagactgctgtttagagtggccaacggcctggctttccccaagcagaccaccaaggacaacggcatcatcccaatccaggttcacctggccgagctgcagtgtatcctggctcacgccgagaagtacctgcctttcctgaagaacgccgacgccaatggcctgagcgtgcgggaaaagatcacccagatcgtgaagttcagaatcccctactacgtgggacccctggccggcacaagactgtctagagaacagggcagatgctgggtcgagcggagagccgagctgaagaatgagaagatctacccctggaacttcgacaaggtggtggacctggaagcctccgccgagaacttcatcaccaacatgaccgccaagtgcacctacctcgtgggcgaagatgtgctccccaaagagtccctgctgtactccgagttcatggtccgaaacgccctgaacaacctgaccatcgacggcgagagactgcccgtttctctgctgcagaaaatctacaagcagctgttcctggaaaagaccttcaaagtgaccaagaaggccctggaacggttcttcaaacaagagaatgtgtcctaccacgatatcggcggcatcgacgacaagatcaacgcctccatgaaggcctacaacgacttcaagcggatcttcggcgaggcctacatcgaaatgcaccgggatgagatcgagaacatcatccggtggatcaccctgttttgcgacgagaagaagatgctcgagacaaagatccgcaagacgtaccctcagatccccgatgataagatcaaggccattaagaagctgaagtacaaggactggggcagactgagcgccacactgctggattctggcaagatcgcctacgaggatgccagcgtgggcgagagaatcaccatcatctctgccctgcggcacaccaacaagaatttcatggaactgctgagcagcaactgccagtacgacttcatcggcaagattaaggacttcaacggctccaagcagagcgacaatggcaagctgacctacaaggatgtggaagaactgtacgtgtcccctagcgtgaagcggagcatctggcagaccctgaccattctggaagagatcaagaaaatcatgggctgcgagcccaagcgcatcttcatcgagatggccagaagcaaagaggaaagcctgcggaccaacagcaggctgcagagactccaggacctgtacaagaagtgcaaagaagagaacatcgacttcatgcccaaggccgacgagctgaccgacatcagatctcagctccagtgcaagaacgaagaggacctgcggagcgacaagctgtacctgtactacacccagatggggagatgcatgtacaccggcgagaggatcgaactggccagcctgtacgaccagaacaaatacgacgtggacgccatctaccccaggtctaagaccaaggacgacagcctgaacaatcgggtgctcgtgaagaaagagattaacagcgccaagacagacaactaccccatcgacgctgacatccggaagaaaatgcacgccttttggaagatgctgtacgacaagggcttcatcgaccaaaagaagtacgagcggctgaccagaagcacccagctgacagatgaagaactggctggcttcatcaaccggcagctggtggaaaccagacagagcacaaaggccaccgccgacattctgaagtctgcctacgagcacagcgaggtggtgtatgtgaaggccggcaacgtgtccgatttccggcagcagttcgacttcgtgaagtgccgggaagtgaacgacctgcaccacgccaaggacgcctacctgaatatcgtcgtgggcaactgctaccacgtcaagttcaccatcaatccgctgatgttcatccggggcaaccaggacaaccggcggtactctctgaagcccgaggtgttctacgcccacgacattaagcggaacggggagattgcttggctggccggcgataatggcaccatggccacagtgaagagagtgatgcagaaaaacaacgtgctgttcacccggctggccgtggaaggcaaaggcgagctgttcaagcagaaccctctgaaggccaagagcggccagctgcctcttaaagccggcctgagcatcgataagtatggcggctacgactccctgagcaccgcctattttgccctggtggaatccgagggcaagaaaggcgccgtgcagtttacaatcgaggccattcctctggtgtacgccaaacagggcgaagccaccatcaagaaatacctgacagaggtggtgggtacctctggcggcagcagcggcggctcaagcggaagtgaaacacctggaacttccgaaagcgctacgcctgaatcttctggtggatcttctggcggatcttccgttacccagaagtggacccatcgataccagttgaaacccggccgatgggtttttgcccccacagatgaggccaagaagtgcggtgctcacattaagcgcagcgtggcttccaggtggaaggccccaaacttctactatcacctcagaaatggcgggcacgttgcggccgtacggtcccacgaactgagccggtttttcttccgggcagatttggacgatttctttgggagagtgaaccggtcccgcgtgacccggtgccttaaaccttggttctcatacgccgaagcaagggagatggcctcagaatctgtcgtgaagcgacctggagagacagcctttgtgctgccgtatgggttcgtgcagagccctatcctcgcatccttggccctggacaagagtaaactgggtagcctgctgagatcactggacgggggccgcgatttcacggtgagcgtctatgtcgacgacatcattatctctggagatgacgaagctcaacttaaagaggtagcatcccgccttgagagagtggcgagtgaggccctgtttccactcagcagtggcaaaactcagggacccgcctctggagtgactgtttttaacatagaactgtcccatagaatgctcaggattaccgatgataggctcgcttcactgaggctcgactatcaggcgactgcatctgagaggtgtaaagctggcatcgtgtcctacgtatacagtgtgaatccagatcaggtcgctcaagtgacaagcggcggcagtagcggcggcagttctggatctgaaacgcctggaacatctgagagcgccacccccgagagcagcggtggatcttctggtgggtcttctggtacccagctgtgcaagcccgagatcaaagtgatgcggatcaagaagtactccctgctgaagatcaatggcttccccatgcacatctccggcagaaccggaaagcagctgatcttctacgtggccagccagctgtgtatcgacgagaacagcgtggcctatctgaagaaagccctgaagtatgagagcaacctcgaggaaaacgaggccatcctggccgataagaatgccgacgagtccatgaagcagaaagccttcaaccggctcatgttctacaaggacacctggggaatcagcgccgaggctaacctgcagctgtacgatatgctgctggctaagagcgccaacaacctctacaagaacagacccgccagccagaccgccactctgaaagagaagagagagcagttcgccaagctgagcctgagcaagcagatccacgtgatcaaagagatcctgaacctgttcaagtgcgcctccgccagcgccgatttcaagctgcttgataagggcgctgcctgcggcatcctgaaagtgtccaacaacatcaccaagctgaagcagtgcgtgctgatcaatcagagccccaccggcgtgttcgagcaagaggttgacctgatgagactgcctaggggcggcggaggcagctaccc

SEQ ID NO: 1696 - DNA, 5118 bp, synthetic construct
  source 1..5118: mol_type = other DNA; note mammalian_codon_optimized_tethered_system_MG160-4_H230R_MG7 1-2n_C-term
tgccaagcttccgagctctcgaattcccaccatgaagaggaccgctgatggttccgaatttgaatctcctaagaagaaacgaaaggttcagaacaagaagaacgtcgactactacgtcggcctggacatgggagatgcctctgttggatgggccgtgaccgacctgaactacaacatcctgaagttcaacggcaaggccctgtggggcatcagactgttcgattctgccgaaaccgccgctgccagaagaggctttagatctgccaggcggcggatcgacagagtgtcttggagaatctccatgctgcaagagctgttcgccgacgagatcgccaaagtggatgccggcttcttccagcggctgaaggatagcagactgcaggtcgaggacaagcaagagaaaaccgcctacaacctgttcgtgggccagaactacaccgacaaggacttctaccagcagtaccccaccatgtaccacctgagatacgccctggctacacaggccggaccttttgatgtgcggctgctgtatctggccgtgcagcacatcgtgaagcaccggggccactttctgttcgagaacctggacgccagcaaagtgggcgatttcgtggccgtgtttggcgaggtggaaagctacgtgcacgacgagatggaactggacgagtggtactgccacgacatcgatgccctggccaaggtgctgtgcaatgccaatctgggcatcaccgccaagcagaaggccatccagaatctgctgcccgccaagaccaagcaagaaaaggccatcgtgcagctgctgagcggcggaaaggccaagctgtgcgacctgttctgtgacgaggaactggccgaatgcgagaaaaagagcatcagcttccaagaggacaacctcgatgagctggaacccatcctggaagctatcctgcaagagagatacgaggccctgctgcggttcaaggccgtgtatgattggagcctgctggccaagatcctgagactggacgccgacaagaaaagcgagaacgagatgcacctcctgagcgagtgcaaagtgaaggtgtacgaggaacacaagaaagacctggctgtgctgaagtccatgctgaagggcaagcccctgtacaacaagctgttcagacaggacggcgaggacacctacgccaattacgcccagggaatcaaagggatcaaccaggtggacttctgcaagtccctgaagaagcagctggaatctatcggcgagtacaagaaacagatgcagcagctgaccagcttcgaggacgcccagaccgatgtggaaagactgctgtttagagtggccaacggcctggctttccccaagcagaccaccaaggacaacggcatcatcccaatccaggttcacctggccgagctgcagtgtatcctggctcacgccgagaagtacctgcctttcctgaagaacgccgacgccaatggcctgagcgtgcgggaaaagatcacccagatcgtgaagttcagaatcccctactacgtgggacccctggccggcacaagactgtctagagaacagggcagatgctgggtcgagcggagagccgagctgaagaatgagaagatctacccctggaacttcgacaaggtggtggacctggaagcctccgccgagaacttcatcaccaacatgaccgccaagtgcacctacctcgtgggcgaagatgtgctccccaaagagtccctgctgtactccgagttcatggtccgaaacgccctgaacaacctgaccatcgacggcgagagactgcccgtttctctgctgcagaaaatctacaagcagctgttcctggaaaagaccttcaaagtgaccaagaaggccctggaacggttcttcaaacaagagaatgtgtcctaccacgatatcggcggcatcgacgacaagatcaacgcctccatgaaggcctacaacgacttcaagcggatcttcggcgaggcctacatcgaaatgcaccgggatgagatcgagaacatcatccggtggatcaccctgttttgcgacgagaagaagatgctcgagacaaagatccgcaagacgtaccctcagatccccgatgataagatcaaggccattaagaagctgaagtacaaggactggggcagactgagcgccacactgctggattctggcaagatcgcctacgaggatgccagcgtgggcgagagaatcaccatcatctctgccctgcggcacaccaacaagaatttcatggaactgctgagcagcaactgccagtacgacttcatcggcaagattaaggacttcaacggctccaagcagagcgacaatggcaagctgacctacaaggatgtggaagaactgtacgtgtcccctagcgtgaagcggagcatctggcagaccctgaccattctggaagagatcaagaaaatcatgggctgcgagcccaagcgcatcttcatcgagatggccagaagcaaagaggaaagcctgcggaccaacagcaggctgcagagactccaggacctgtacaagaagtgcaaagaagagaacatcgacttcatgcccaaggccgacgagctgaccgacatcagatctcagctccagtgcaagaacgaagaggacctgcggagcgacaagctgtacctgtactacacccagatggggagatgcatgtacaccggcgagaggatcgaactggccagcctgtacgaccagaacaaatacgacgtggacgccatctaccccaggtctaagaccaaggacgacagcctgaacaatcgggtgctcgtgaagaaagagattaacagcgccaagacagacaactaccccatcgacgctgacatccggaagaaaatgcacgccttttggaagatgctgtacgacaagggcttcatcgaccaaaagaagtacgagcggctgaccagaagcacccagctgacagatgaagaactggctggcttcatcaaccggcagctggtggaaaccagacagagcacaaaggccaccgccgacattctgaagtctgcctacgagcacagcgaggtggtgtatgtgaaggccggcaacgtgtccgatttccggcagcagttcgacttcgtgaagtgccgggaagtgaacgacctgcaccacgccaaggacgcctacctgaatatcgtcgtgggcaactgctaccacgtcaagttcaccatcaatccgctgatgttcatccggggcaaccaggacaaccggcggtactctctgaagcccgaggtgttctacgcccacgacattaagcggaacggggagattgcttggctggccggcgataatggcaccatggccacagtgaagagagtgatgcagaaaaacaacgtgctgttcacccggctggccgtggaaggcaaaggcgagctgttcaagcagaaccctctgaaggccaagagcggccagctgcctcttaaagccggcctgagcatcgataagtatggcggctacgactccctgagcaccgcctattttgccctggtggaatccgagggcaagaaaggcgccgtgcagtttacaatcgaggccattcctctggtgtacgccaaacagggcgaagccaccatcaagaaatacctgacagaggtggtgcagctgtgcaagcccgagatcaaagtgatgcggatcaagaagtactccctgctgaagatcaatggcttccccatgcacatctccggcagaaccggaaagcagctgatcttctacgtggccagccagctgtgtatcgacgagaacagcgtggcctatctgaagaaagccctgaagtatgagagcaacctcgaggaaaacgaggccatcctggccgataagaatgccgacgagtccatgaagcagaaagccttcaaccggctcatgttctacaaggacacctggggaatcagcgccgaggctaacctgcagctgtacgatatgctgctggctaagagcgccaacaacctctacaagaacagacccgccagccagaccgccactctgaaagagaagagagagcagttcgccaagctgagcctgagcaagcagatccacgtgatcaaagagatcctgaacctgttcaagtgcgcctccgccagcgccgatttcaagctgcttgataagggcgctgcctgcggcatcctgaaagtgtccaacaacatcaccaagctgaagcagtgcgtgctgatcaatcagagccccaccggcgtgttcgagcaagaggttgacctgatgagactgtctggcggcagcagcggcggctcaagcggaagtgaaacacctggaacttccgaaagcgctacgcctgaatcttctggtggatcttctggcggatcttccgcatgcgttacccagaagtggacccatcgataccagttgaaacccggccgatgggtttttgcccccacagatgaggccaagaagtgcggtgctcacattaagcgcagcgtggcttccaggtggaaggccccaaacttctactatcacctcagaaatggcgggcacgttgcggccgtacggtcccacgaactgagccggtttttcttccgggcagatttggacgatttctttgggagagtgaaccggtcccgcgtgacccggtgccttaaaccttggttctcatacgccgaagcaagggagatggcctcagaatctgtcgtgaagcgacctggagagacagcctttgtgctgccgtatgggttcgtgcagagccctatcctcgcatccttggccctggacaagagtaaactgggtagcctgctgagatcactggacgggggccgcgatttcacggtgagcgtctatgtcgacgacatcattatctctggagatgacgaagctcaacttaaagaggtagcatcccgccttgagagagtggcgagtgaggccctgtttccactcagcagtggcaaaactcagggacccgcctctggagtgactgtttttaacatagaactgtcccatagaatgctcaggattaccgatgataggctcgcttcactgaggctcgactatcaggcgactgcatctgagaggtgtaaagctggcatcgtgtcctacgtatacagtgtgaatccagatcaggtcgctcaagtgacacctaggggcggcggaggcagctaccc

SEQ ID NO: 1697 - DNA, 753 bp, synthetic construct; identical to SEQ ID NO: 1295
  source 1..753: mol_type = other DNA; note = MG160-4_cloned_into_untethered_tethered_plasmid

SEQ ID NO: 1698 - DNA, 5178 bp, synthetic construct
  source 1..5178: mol_type = other DNA; note mammalian_codon_optimized_tethered_system_MG160-4_WT_MG71-2 n_33AA_linker
atgaagaggaccgctgatggttccgaatttgaatctcctaagaagaaacgaaaggttgttacccagaagtggacccatcgataccagttgaaacccggccgatgggtttttgcccccacagatgaggccaagaagtgcggtgctcacattaagcgcagcgtggcttccaggtggaaggccccaaacttctactatcacctcagaaatggcgggcacgttgcggccgtacggtcccacgaactgagccggtttttcttccgggcagatttggacgatttctttgggagagtgaaccggtctcgcgtgacccggtgccttaaaccttggttctcatacgccgaagcaagggagatggcctcagaatctgtcgtgaagcgacctggagagacagcctttgtgctgccgtatgggttcgtgcagagccctatcctcgcatccttggccctggacaagagtaaactgggtagcctgctgagatcactggacgggggccgcgatttcacggtgagcgtctatgtcgacgacatcattatctctggagacgacgaagctcaacttaaagaggtagcatcccgccttgagagagtggcgagtgaggccctgtttccactcagcagtggcaaaactcagggacccgcctctggagtgactgtttttaacatagaactgtcccatagaatgctcaggattaccgatgataggctcgcttcactgaggctcgactatcaggcgactgcatctgagcattgtaaagctggcatcgtctcctacgtatacagtgtgaatccagatcaggtcgctcaagtgacatctggcggcagcagcggcggctcaagcggaagtgaaacacctggaacttccgaaagcgctacgcctgaatcttctggtggatcttctggcggatcttccgcatgccagaacaagaagaacgtcgactactacgtcggcctggacatgggagatgcctctgttggatgggccgtgaccgacctgaactacaacatcctgaagttcaacggcaaggccctgtggggcatcagactgttcgattctgccgaaaccgccgctgccagaagaggctttagatctgccaggcggcggatcgacagagtgtcttggagaatctccatgctgcaagagctgttcgccgacgagatcgccaaagtggatgccggcttcttccagcggctgaaggatagcagactgcaggtcgaggacaagcaagagaaaaccgcctacaacctgttcgtgggccagaactacaccgacaaggacttctaccagcagtaccccaccatgtaccacctgagatacgccctggctacacaggccggaccttttgatgtgcggctgctgtatctggccgtgcagcacatcgtgaagcaccggggccactttctgttcgagaacctggacgccagcaaagtgggcgatttcgtggccgtgtttggcgaggtggaaagctacgtgcacgacgagatggaactggacgagtggtactgccacgacatcgatgccctggccaaggtgctgtgcaatgccaatctgggcatcaccgccaagcagaaggccatccagaatctgctgcccgccaagaccaagcaagaaaaggccatcgtgcagctgctgagcggcggaaaggccaagctgtgcgacctgttctgtgacgaggaactggccgaatgcgagaaaaagagcatcagcttccaagaggacaacctcgatgagctggaacccatcctggaagctatcctgcaagagagatacgaggccctgctgcggttcaaggccgtgtatgattggagcctgctggccaagatcctgagactggacgccgacaagaaaagcgagaacgagatgcacctcctgagcgagtgcaaagtgaaggtgtacgaggaacacaagaaagacctggctgtgctgaagtccatgctgaagggcaagcccctgtacaacaagctgttcagacaggacggcgaggacacctacgccaattacgcccagggaatcaaagggatcaaccaggtggacttctgcaagtccctgaagaagcagctggaatctatcggcgagtacaagaaacagatgcagcagctgaccagcttcgaggacgcccagaccgatgtggaaagactgctgtttagagtggccaacggcctggctttccccaagcagaccaccaaggacaacggcatcatcccaatccaggttcacctggccgagctgcagtgtatcctggctcacgccgagaagtacctgcctttcctgaagaacgccgacgccaatggcctgagcgtgcgggaaaagatcacccagatcgtgaagttcagaatcccctactacgtgggacccctggccggcacaagactgtctagagaacagggcagatgctgggtcgagcggagagccgagctgaagaatgagaagatctacccctggaacttcgacaaggtggtggacctggaagcctccgccgagaacttcatcaccaacatgaccgccaagtgcacctacctcgtgggcgaagatgtgctccccaaagagtccctgctgtactccgagttcatggtccgaaacgccctgaacaacctgaccatcgacggcgagagactgcccgtttctctgctgcagaaaatctacaagcagctgttcctggaaaagaccttcaaagtgaccaagaaggccctggaacggttcttcaaacaagagaatgtgtcctaccacgatatcggcggcatcgacgacaagatcaacgcctccatgaaggcctacaacgacttcaagcggatcttcggcgaggcctacatcgaaatgcaccgggatgagatcgagaacatcatccggtggatcaccctgttttgcgacgagaagaagatgctcgagacaaagatccgcaagacgtaccctcagatccccgatgataagatcaaggccattaagaagctgaagtacaaggactggggcagactgagcgccacactgctggattctggcaagatcgcctacgaggatgccagcgtgggcgagagaatcaccatcatctctgccctgcggcacaccaacaagaatttcatggaactgctgagcagcaactgccagtacgacttcatcggcaagattaaggacttcaacggctccaagcagagcgacaatggcaagctgacctacaaggatgtggaagaactgtacgtgtcccctagcgtgaagcggagcatctggcagaccctgaccattctggaagagatcaagaaaatcatgggctgcgagcccaagcgcatcttcatcgagatggccagaagcaaagaggaaagcctgcggaccaacagcaggctgcagagactccaggacctgtacaagaagtgcaaagaagagaacatcgacttcatgcccaaggccgacgagctgaccgacatcagatctcagctccagtgcaagaacgaagaggacctgcggagcgacaagctgtacctgtactacacccagatggggagatgcatgtacaccggcgagaggatcgaactggccagcctgtacgaccagaacaaatacgacgtggacgccatctaccccaggtctaagaccaaggacgacagcctgaacaatcgggtgctcgtgaagaaagagattaacagcgccaagacagacaactaccccatcgacgctgacatccggaagaaaatgcacgccttttggaagatgctgtacgacaagggcttcatcgaccaaaagaagtacgagcggctgaccagaagcacccagctgacagatgaagaactggctggcttcatcaaccggcagctggtggaaaccagacagagcacaaaggccaccgccgacattctgaagtctgcctacgagcacagcgaggtggtgtatgtgaaggccggcaacgtgtccgatttccggcagcagttcgacttcgtgaagtgccgggaagtgaacgacctgcaccacgccaaggacgcctacctgaatatcgtcgtgggcaactgctaccacgtcaagttcaccatcaatccgctgatgttcatccggggcaaccaggacaaccggcggtactctctgaagcccgaggtgttctacgcccacgacattaagcggaacggggagattgcttggctggccggcgataatggcaccatggccacagtgaagagagtgatgcagaaaaacaacgtgctgttcacccggctggccgtggaaggcaaaggcgagctgttcaagcagaaccctctgaaggccaagagcggccagctgcctcttaaagccggcctgagcatcgataagtatggcggctacgactccctgagcaccgcctattttgccctggtggaatccgagggcaagaaaggcgccgtgcagtttacaatcgaggccattcctctggtgtacgccaaacagggcgaagccaccatcaagaaatacctgacagaggtggtgcagctgtgcaagcccgagatcaaagtgatgcggatcaagaagtactccctgctgaagatcaatggcttccccatgcacatctccggcagaaccggaaagcagctgatcttctacgtggccagccagctgtgtatcgacgagaacagcgtggcctatctgaagaaagccctgaagtatgagagcaacctcgaggaaaacgaggccatcctggccgataagaatgccgacgagtccatgaagcagaaagccttcaaccggctcatgttctacaaggacacctggggaatcagcgccgaggctaacctgcagctgtacgatatgctgctggctaagagcgccaacaacctctacaagaacagacccgccagccagaccgccactctgaaagagaagagagagcagttcgccaagctgagcctgagcaagcagatccacgtgatcaaagagatcctgaacctgttcaagtgcgcctccgccagcgccgatttcaagctgcttgataagggcgctgcctgcggcatcctgaaagtgtccaacaacatcaccaagctgaagcagtgcgtgctgatcaatcagagccccaccggcgtgttcgagcaagaggttgacctgatgagactgcctaggggcggcggaggcagctacccctatgatgtacctgattatgcttctggcggacccaagaagaagaggaaagtcggtggttctcctaagaaaaagagaaaggtcggatccggc

SEQ ID NO: 1699 - DNA, 5121 bp, synthetic construct
  source 1..5121: mol_type = other DNA; note mammalian_codon_optimized_tethered_system_MG160-4_WT_MG71-2 n_14AA_linker
atgaagaggaccgctgatggttccgaatttgaatctcctaagaagaaacgaaaggttgttacccagaagtggacccatcgataccagttgaaacccggccgatgggtttttgcccccacagatgaggccaagaagtgcggtgctcacattaagcgcagcgtggcttccaggtggaaggccccaaacttctactatcacctcagaaatggcgggcacgttgcggccgtacggtcccacgaactgagccggtttttcttccgggcagatttggacgatttctttgggagagtgaaccggtctcgcgtgacccggtgccttaaaccttggttctcatacgccgaagcaagggagatggcctcagaatctgtcgtgaagcgacctggagagacagcctttgtgctgccgtatgggttcgtgcagagccctatcctcgcatccttggccctggacaagagtaaactgggtagcctgctgagatcactggacgggggccgcgatttcacggtgagcgtctatgtcgacgacatcattatctctggagacgacgaagctcaacttaaagaggtagcatcccgccttgagagagtggcgagtgaggccctgtttccactcagcagtggcaaaactcagggacccgcctctggagtgactgtttttaacatagaactgtcccatagaatgctcaggattaccgatgataggctcgcttcactgaggctcgactatcaggcgactgcatctgagcattgtaaagctggcatcgtctcctacgtatacagtgtgaatccagatcaggtcgctcaagtgacaaaattaggaggaggtgcccctgctgtcggaggaggtccaaaggcatgccagaacaagaagaacgtcgactactacgtcggcctggacatgggagatgcctctgttggatgggccgtgaccgacctgaactacaacatcctgaagttcaacggcaaggccctgtggggcatcagactgttcgattctgccgaaaccgccgctgccagaagaggctttagatctgccaggcggcggatcgacagagtgtcttggagaatctccatgctgcaagagctgttcgccgacgagatcgccaaagtggatgccggcttcttccagcggctgaaggatagcagactgcaggtcgaggacaagcaagagaaaaccgcctacaacctgttcgtgggccagaactacaccgacaaggacttctaccagcagtaccccaccatgtaccacctgagatacgccctggctacacaggccggaccttttgatgtgcggctgctgtatctggccgtgcagcacatcgtgaagcaccggggccactttctgttcgagaacctggacgccagcaaagtgggcgatttcgtggccgtgtttggcgaggtggaaagctacgtgcacgacgagatggaactggacgagtggtactgccacgacatcgatgccctggccaaggtgctgtgcaatgccaatctgggcatcaccgccaagcagaaggccatccagaatctgctgcccgccaagaccaagcaagaaaaggccatcgtgcagctgctgagcggcggaaaggccaagctgtgcgacctgttctgtgacgaggaactggccgaatgcgagaaaaagagcatcagcttccaagaggacaacctcgatgagctggaacccatcctggaagctatcctgcaagagagatacgaggccctgctgcggttcaaggccgtgtatgattggagcctgctggccaagatcctgagactggacgccgacaagaaaagcgagaacgagatgcacctcctgagcgagtgcaaagtgaaggtgtacgaggaacacaagaaagacctggctgtgctgaagtccatgctgaagggcaagcccctgtacaacaagctgttcagacaggacggcgaggacacctacgccaattacgcccagggaatcaaagggatcaaccaggtggacttctgcaagtccctgaagaagcagctggaatctatcggcgagtacaagaaacagatgcagcagctgaccagcttcgaggacgcccagaccgatgtggaaagactgctgtttagagtggccaacggcctggctttccccaagcagaccaccaaggacaacggcatcatcccaatccaggttcacctggccgagctgcagtgtatcctggctcacgccgagaagtacctgcctttcctgaagaacgccgacgccaatggcctgagcgtgcgggaaaagatcacccagatcgtgaagttcagaatcccctactacgtgggacccctggccggcacaagactgtctagagaacagggcagatgctgggtcgagcggagagccgagctgaagaatgagaagatctacccctggaacttcgacaaggtggtggacctggaagcctccgccgagaacttcatcaccaacatgaccgccaagtgcacctacctcgtgggcgaagatgtgctccccaaagagtccctgctgtactccgagttcatggtccgaaacgccctgaacaacctgaccatcgacggcgagagactgcccgtttctctgctgcagaaaatctacaagcagctgttcctggaaaagaccttcaaagtgaccaagaaggccctggaacggttcttcaaacaagagaatgtgtcctaccacgatatcggcggcatcgacgacaagatcaacgcctccatgaaggcctacaacgacttcaagcggatcttcggcgaggcctacatcgaaatgcaccgggatgagatcgagaacatcatccggtggatcaccctgttttgcgacgagaagaagatgctcgagacaaagatccgcaagacgtaccctcagatccccgatgataagatcaaggccattaagaagctgaagtacaaggactggggcagactgagcgccacactgctggattctggcaagatcgcctacgaggatgccagcgtgggcgagagaatcaccatcatctctgccctgcggcacaccaacaagaatttcatggaactgctgagcagcaactgccagtacgacttcatcggcaagattaaggacttcaacggctccaagcagagcgacaatggcaagctgacctacaaggatgtggaagaactgtacgtgtcccctagcgtgaagcggagcatctggcagaccctgaccattctggaagagatcaagaaaatcatgggctgcgagcccaagcgcatcttcatcgagatggccagaagcaaagaggaaagcctgcggaccaacagcaggctgcagagactccaggacctgtacaagaagtgcaaagaagagaacatcgacttcatgcccaaggccgacgagctgaccgacatcagatctcagctccagtgcaagaacgaagaggacctgcggagcgacaagctgtacctgtactacacccagatggggagatgcatgtacaccggcgagaggatcgaactggccagcctgtacgaccagaacaaatacgacgtggacgccatctaccccaggtctaagaccaaggacgacagcctgaacaatcgggtgctcgtgaagaaagagattaacagcgccaagacagacaactaccccatcgacgctgacatccggaagaaaatgcacgccttttggaagatgctgtacgacaagggcttcatcgaccaaaagaagtacgagcggctgaccagaagcacccagctgacagatgaagaactggctggcttcatcaaccggcagctggtggaaaccagacagagcacaaaggccaccgccgacattctgaagtctgcctacgagcacagcgaggtggtgtatgtgaaggccggcaacgtgtccgatttccggcagcagttcgacttcgtgaagtgccgggaagtgaacgacctgcaccacgccaaggacgcctacctgaatatcgtcgtgggcaactgctaccacgtcaagttcaccatcaatccgctgatgttcatccggggcaaccaggacaaccggcggtactctctgaagcccgaggtgttctacgcccacgacattaagcggaacggggagattgcttggctggccggcgataatggcaccatggccacagtgaagagagtgatgcagaaaaacaacgtgctgttcacccggctggccgtggaaggcaaaggcgagctgttcaagcagaaccctctgaaggccaagagcggccagctgcctcttaaagccggcctgagcatcgataagtatggcggctacgactccctgagcaccgcctattttgccctggtggaatccgagggcaagaaaggcgccgtgcagtttacaatcgaggccattcctctggtgtacgccaaacagggcgaagccaccatcaagaaatacctgacagaggtggtgcagctgtgcaagcccgagatcaaagtgatgcggatcaagaagtactccctgctgaagatcaatggcttccccatgcacatctccggcagaaccggaaagcagctgatcttctacgtggccagccagctgtgtatcgacgagaacagcgtggcctatctgaagaaagccctgaagtatgagagcaacctcgaggaaaacgaggccatcctggccgataagaatgccgacgagtccatgaagcagaaagccttcaaccggctcatgttctacaaggacacctggggaatcagcgccgaggctaacctgcagctgtacgatatgctgctggctaagagcgccaacaacctctacaagaacagacccgccagccagaccgccactctgaaagagaagagagagcagttcgccaagctgagcctgagcaagcagatccacgtgatcaaagagatcctgaacctgttcaagtgcgcctccgccagcgccgatttcaagctgcttgataagggcgctgcctgcggcatcctgaaagtgtccaacaacatcaccaagctgaagcagtgcgtgctgatcaatcagagccccaccggcgtgttcgagcaagaggttgacctgatgagactgcctaggggcggcggaggcagctacccctatgatgtacctgattatgcttctggcggacccaagaagaagaggaaagtcggtggttctcctaagaaaaagagaaaggtcggatccggc

SEQ ID NO: 1700 - DNA, 5124 bp, synthetic construct
  source 1..5124: mol_type = other DNA; note mammalian_codon_optimized_tethered_system_MG160-4_WT_MG71-2 n_15AA_linker
atgaagaggaccgctgatggttccgaatttgaatctcctaagaagaaacgaaaggttgttacccagaagtggacccatcgataccagttgaaacccggccgatgggtttttgcccccacagatgaggccaagaagtgcggtgctcacattaagcgcagcgtggcttccaggtggaaggccccaaacttctactatcacctcagaaatggcgggcacgttgcggccgtacggtcccacgaactgagccggtttttcttccgggcagatttggacgatttctttgggagagtgaaccggtctcgcgtgacccggtgccttaaaccttggttctcatacgccgaagcaagggagatggcctcagaatctgtcgtgaagcgacctggagagacagcctttgtgctgccgtatgggttcgtgcagagccctatcctcgcatccttggccctggacaagagtaaactgggtagcctgctgagatcactggacgggggccgcgatttcacggtgagcgtctatgtcgacgacatcattatctctggagacgacgaagctcaacttaaagaggtagcatcccgccttgagagagtggcgagtgaggccctgtttccactcagcagtggcaaaactcagggacccgcctctggagtgactgtttttaacatagaactgtcccatagaatgctcaggattaccgatgataggctcgcttcactgaggctcgactatcaggcgactgcatctgagcattgtaaagctggcatcgtctcctacgtatacagtgtgaatccagatcaggtcgctcaagtgacaggcggaggaggaagcggtggaggaggctctggcggcggtggctcagcatgccagaacaagaagaacgtcgactactacgtcggcctggacatgggagatgcctctgttggatgggccgtgaccgacctgaactacaacatcctgaagttcaacggcaaggccctgtggggcatcagactgttcgattctgccgaaaccgccgctgccagaagaggctttagatctgccaggcggcggatcgacagagtgtcttggagaatctccatgctgcaagagctgttcgccgacgagatcgccaaagtggatgccggcttcttccagcggctgaaggatagcagactgcaggtcgaggacaagcaagagaaaaccgcctacaacctgttcgtgggccagaactacaccgacaaggacttctaccagcagtaccccaccatgtaccacctgagatacgccctggctacacaggccggaccttttgatgtgcggctgctgtatctggccgtgcagcacatcgtgaagcaccggggccactttctgttcgagaacctggacgccagcaaagtgggcgatttcgtggccgtgtttggcgaggtggaaagctacgtgcacgacgagatggaactggacgagtggtactgccacgacatcgatgccctggccaaggtgctgtgcaatgccaatctgggcatcaccgccaagcagaaggccatccagaatctgctgcccgccaagaccaagcaagaaaaggccatcgtgcagctgctgagcggcggaaaggccaagctgtgcgacctgttctgtgacgaggaactggccgaatgcgagaaaaagagcatcagcttccaagaggacaacctcgatgagctggaacccatcctggaagctatcctgcaagagagatacgaggccctgctgcggttcaaggccgtgtatgattggagcctgctggccaagatcctgagactggacgccgacaagaaaagcgagaacgagatgcacctcctgagcgagtgcaaagtgaaggtgtacgaggaacacaagaaagacctggctgtgctgaagtccatgctgaagggcaagcccctgtacaacaagctgttcagacaggacggcgaggacacctacgccaattacgcccagggaatcaaagggatcaaccaggtggacttctgcaagtccctgaagaagcagctggaatctatcggcgagtacaagaaacagatgcagcagctgaccagcttcgaggacgcccagaccgatgtggaaagactgctgtttagagtggccaacggcctggctttccccaagcagaccaccaaggacaacggcatcatcccaatccaggttcacctggccgagctgcagtgtatcctggctcacgccgagaagtacctgcctttcctgaagaacgccgacgccaatggcctgagcgtgcgggaaaagatcacccagatcgtgaagttcagaatcccctactacgtgggacccctggccggcacaagactgtctagagaacagggcagatgctgggtcgagcggagagccgagctgaagaatgagaagatctacccctggaacttcgacaaggtggtggacctggaagcctccgccgagaacttcatcaccaacatgaccgccaagtgcacctacctcgtgggcgaagatgtgctccccaaagagtccctgctgtactccgagttcatggtccgaaacgccctgaacaacctgaccatcgacggcgagagactgcccgtttctctgctgcagaaaatctacaagcagctgttcctggaaaagaccttcaaagtgaccaagaaggccctggaacggttcttcaaacaagagaatgtgtcctaccacgatatcggcggcatcgacgacaagatcaacgcctccatgaaggcctacaacgacttcaagcggatcttcggcgaggcctacatcgaaatgcaccgggatgagatcgagaacatcatccggtggatcaccctgttttgcgacgagaagaagatgctcgagacaaagatccgcaagacgtaccctcagatccccgatgataagatcaaggccattaagaagctgaagtacaaggactggggcagactgagcgccacactgctggattctggcaagatcgcctacgaggatgccagcgtgggcgagagaatcaccatcatctctgccctgcggcacaccaacaagaatttcatggaactgctgagcagcaactgccagtacgacttcatcggcaagattaaggacttcaacggctccaagcagagcgacaatggcaagctgacctacaaggatgtggaagaactgtacgtgtcccctagcgtgaagcggagcatctggcagaccctgaccattctggaagagatcaagaaaatcatgggctgcgagcccaagcgcatcttcatcgagatggccagaagcaaagaggaaagcctgcggaccaacagcaggctgcagagactccaggacctgtacaagaagtgcaaagaagagaacatcgacttcatgcccaaggccgacgagctgaccgacatcagatctcagctccagtgcaagaacgaagaggacctgcggagcgacaagctgtacctgtactacacccagatggggagatgcatgtacaccggcgagaggatcgaactggccagcctgtacgaccagaacaaatacgacgtggacgccatctaccccaggtctaagaccaaggacgacagcctgaacaatcgggtgctcgtgaagaaagagattaacagcgccaagacagacaactaccccatcgacgctgacatccggaagaaaatgcacgccttttggaagatgctgtacgacaagggcttcatcgaccaaaagaagtacgagcggctgaccagaagcacccagctgacagatgaagaactggctggcttcatcaaccggcagctggtggaaaccagacagagcacaaaggccaccgccgacattctgaagtctgcctacgagcacagcgaggtggtgtatgtgaaggccggcaacgtgtccgatttccggcagcagttcgacttcgtgaagtgccgggaagtgaacgacctgcaccacgccaaggacgcctacctgaatatcgtcgtgggcaactgctaccacgtcaagttcaccatcaatccgctgatgttcatccggggcaaccaggacaaccggcggtactctctgaagcccgaggtgttctacgcccacgacattaagcggaacggggagattgcttggctggccggcgataatggcaccatggccacagtgaagagagtgatgcagaaaaacaacgtgctgttcacccggctggccgtggaaggcaaaggcgagctgttcaagcagaaccctctgaaggccaagagcggccagctgcctcttaaagccggcctgagcatcgataagtatggcggctacgactccctgagcaccgcctattttgccctggtggaatccgagggcaagaaaggcgccgtgcagtttacaatcgaggccattcctctggtgtacgccaaacagggcgaagccaccatcaagaaatacctgacagaggtggtgcagctgtgcaagcccgagatcaaagtgatgcggatcaagaagtactccctgctgaagatcaatggcttccccatgcacatctccggcagaaccggaaagcagctgatcttctacgtggccagccagctgtgtatcgacgagaacagcgtggcctatctgaagaaagccctgaagtatgagagcaacctcgaggaaaacgaggccatcctggccgataagaatgccgacgagtccatgaagcagaaagccttcaaccggctcatgttctacaaggacacctggggaatcagcgccgaggctaacctgcagctgtacgatatgctgctggctaagagcgccaacaacctctacaagaacagacccgccagccagaccgccactctgaaagagaagagagagcagttcgccaagctgagcctgagcaagcagatccacgtgatcaaagagatcctgaacctgttcaagtgcgcctccgccagcgccgatttcaagctgcttgataagggcgctgcctgcggcatcctgaaagtgtccaacaacatcaccaagctgaagcagtgcgtgctgatcaatcagagccccaccggcgtgttcgagcaagaggttgacctgatgagactgcctaggggcggcggaggcagctacccctatgatgtacctgattatgcttctggcggacccaagaagaagaggaaagtcggtggttctcctaagaaaaagagaaaggtcggatccggc

SEQ ID NO: 1701 - DNA, 5157 bp, synthetic construct
  source 1..5157: mol_type = other DNA; note mammalian_codon_optimized_tethered_system_MG160-4_WT_MG71-2 n_26AA_linker
atgaagaggaccgctgatggttccgaatttgaatctcctaagaagaaacgaaaggttgttacccagaagtggacccatcgataccagttgaaacccggccgatgggtttttgcccccacagatgaggccaagaagtgcggtgctcacattaagcgcagcgtggcttccaggtggaaggccccaaacttctactatcacctcagaaatggcgggcacgttgcggccgtacggtcccacgaactgagccggtttttcttccgggcagatttggacgatttctttgggagagtgaaccggtctcgcgtgacccggtgccttaaaccttggttctcatacgccgaagcaagggagatggcctcagaatctgtcgtgaagcgacctggagagacagcctttgtgctgccgtatgggttcgtgcagagccctatcctcgcatccttggccctggacaagagtaaactgggtagcctgctgagatcactggacgggggccgcgatttcacggtgagcgtctatgtcgacgacatcattatctctggagacgacgaagctcaacttaaagaggtagcatcccgccttgagagagtggcgagtgaggccctgtttccactcagcagtggcaaaactcagggacccgcctctggagtgactgtttttaacatagaactgtcccatagaatgctcaggattaccgatgataggctcgcttcactgaggctcgactatcaggcgactgcatctgagcattgtaaagctggcatcgtctcctacgtatacagtgtgaatccagatcaggtcgctcaagtgacaggcggcggcggctctggtggcggcggtagcgaagccgccgctgccaaaggtggcggtgggtcaggtggcggcgggtccgcatgccagaacaagaagaacgtcgactactacgtcggcctggacatgggagatgcctctgttggatgggccgtgaccgacctgaactacaacatcctgaagttcaacggcaaggccctgtggggcatcagactgttcgattctgccgaaaccgccgctgccagaagaggctttagatctgccaggcggcggatcgacagagtgtcttggagaatctccatgctgcaagagctgttcgccgacgagatcgccaaagtggatgccggcttcttccagcggctgaaggatagcagactgcaggtcgaggacaagcaagagaaaaccgcctacaacctgttcgtgggccagaactacaccgacaaggacttctaccagcagtaccccaccatgtaccacctgagatacgccctggctacacaggccggaccttttgatgtgcggctgctgtatctggccgtgcagcacatcgtgaagcaccggggccactttctgttcgagaacctggacgccagcaaagtgggcgatttcgtggccgtgtttggcgaggtggaaagctacgtgcacgacgagatggaactggacgagtggtactgccacgacatcgatgccctggccaaggtgctgtgcaatgccaatctgggcatcaccgccaagcagaaggccatccagaatctgctgcccgccaagaccaagcaagaaaaggccatcgtgcagctgctgagcggcggaaaggccaagctgtgcgacctgttctgtgacgaggaactggccgaatgcgagaaaaagagcatcagcttccaagaggacaacctcgatgagctggaacccatcctggaagctatcctgcaagagagatacgaggccctgctgcggttcaaggccgtgtatgattggagcctgctggccaagatcctgagactggacgccgacaagaaaagcgagaacgagatgcacctcctgagcgagtgcaaagtgaaggtgtacgaggaacacaagaaagacctggctgtgctgaagtccatgctgaagggcaagcccctgtacaacaagctgttcagacaggacggcgaggacacctacgccaattacgcccagggaatcaaagggatcaaccaggtggacttctgcaagtccctgaagaagcagctggaatctatcggcgagtacaagaaacagatgcagcagctgaccagcttcgaggacgcccagaccgatgtggaaagactgctgtttagagtggccaacggcctggctttccccaagcagaccaccaaggacaacggcatcatcccaatccaggttcacctggccgagctgcagtgtatcctggctcacgccgagaagtacctgcctttcctgaagaacgccgacgccaatggcctgagcgtgcgggaaaagatcacccagatcgtgaagttcagaatcccctactacgtgggacccctggccggcacaagactgtctagagaacagggcagatgctgggtcgagcggagagccgagctgaagaatgagaagatctacccctggaacttcgacaaggtggtggacctggaagcctccgccgagaacttcatcaccaacatgaccgccaagtgcacctacctcgtgggcgaagatgtgctccccaaagagtccctgctgtactccgagttcatggtccgaaacgccctgaacaacctgaccatcgacggcgagagactgcccgtttctctgctgcagaaaatctacaagcagctgttcctggaaaagaccttcaaagtgaccaagaaggccctggaacggttcttcaaacaagagaatgtgtcctaccacgatatcggcggcatcgacgacaagatcaacgcctccatgaaggcctacaacgacttcaagcggatcttcggcgaggcctacatcgaaatgcaccgggatgagatcgagaacatcatccggtggatcaccctgttttgcgacgagaagaagatgctcgagacaaagatccgcaagacgtaccctcagatccccgatgataagatcaaggccattaagaagctgaagtacaaggactggggcagactgagcgccacactgctggattctggcaagatcgcctacgaggatgccagcgtgggcgagagaatcaccatcatctctgccctgcggcacaccaacaagaatttcatggaactgctgagcagcaactgccagtacgacttcatcggcaagattaaggacttcaacggctccaagcagagcgacaatggcaagctgacctacaaggatgtggaagaactgtacgtgtcccctagcgtgaagcggagcatctggcagaccctgaccattctggaagagatcaagaaaatcatgggctgcgagcccaagcgcatcttcatcgagatggccagaagcaaagaggaaagcctgcggaccaacagcaggctgcagagactccaggacctgtacaagaagtgcaaagaagagaacatcgacttcatgcccaaggccgacgagctgaccgacatcagatctcagctccagtgcaagaacgaagaggacctgcggagcgacaagctgtacctgtactacacccagatggggagatgcatgtacaccggcgagaggatcgaactggccagcctgtacgaccagaacaaatacgacgtggacgccatctaccccaggtctaagaccaaggacgacagcctgaacaatcgggtgctcgtgaagaaagagattaacagcgccaagacagacaactaccccatcgacgctgacatccggaagaaaatgcacgccttttggaagatgctgtacgacaagggcttcatcgaccaaaagaagtacgagcggctgaccagaagcacccagctgacagatgaagaactggctggcttcatcaaccggcagctggtggaaaccagacagagcacaaaggccaccgccgacattctgaagtctgcctacgagcacagcgaggtggtgtatgtgaaggccggcaacgtgtccgatttccggcagcagttcgacttcgtgaagtgccgggaagtgaacgacctgcaccacgccaaggacgcctacctgaatatcgtcgtgggcaactgctaccacgtcaagttcaccatcaatccgctgatgttcatccggggcaaccaggacaaccggcggtactctctgaagcccgaggtgttctacgcccacgacattaagcggaacggggagattgcttggctggccggcgataatggcaccatggccacagtgaagagagtgatgcagaaaaacaacgtgctgttcacccggctggccgtggaaggcaaaggcgagctgttcaagcagaaccctctgaaggccaagagcggccagctgcctcttaaagccggcctgagcatcgataagtatggcggctacgactccctgagcaccgcctattttgccctggtggaatccgagggcaagaaaggcgccgtgcagtttacaatcgaggccattcctctggtgtacgccaaacagggcgaagccaccatcaagaaatacctgacagaggtggtgcagctgtgcaagcccgagatcaaagtgatgcggatcaagaagtactccctgctgaagatcaatggcttccccatgcacatctccggcagaaccggaaagcagctgatcttctacgtggccagccagctgtgtatcgacgagaacagcgtggcctatctgaagaaagccctgaagtatgagagcaacctcgaggaaaacgaggccatcctggccgataagaatgccgacgagtccatgaagcagaaagccttcaaccggctcatgttctacaaggacacctggggaatcagcgccgaggctaacctgcagctgtacgatatgctgctggctaagagcgccaacaacctctacaagaacagacccgccagccagaccgccactctgaaagagaagagagagcagttcgccaagctgagcctgagcaagcagatccacgtgatcaaagagatcctgaacctgttcaagtgcgcctccgccagcgccgatttcaagctgcttgataagggcgctgcctgcggcatcctgaaagtgtccaacaacatcaccaagctgaagcagtgcgtgctgatcaatcagagccccaccggcgtgttcgagcaagaggttgacctgatgagactgcctaggggcggcggaggcagctacccctatgatgtacctgattatgcttctggcggacccaagaagaagaggaaagtcggtggttctcctaagaaaaagagaaaggtcggatccggc

SEQ ID NO: 1702 - DNA, 5175 bp, synthetic construct
  source 1..5175: mol_type = other DNA; note mammalian_codon_optimized_tethered_system_MG160-4_WT_MG71-2 n_32AA_linker
atgaagaggaccgctgatggttccgaatttgaatctcctaagaagaaacgaaaggttgttacccagaagtggacccatcgataccagttgaaacccggccgatgggtttttgcccccacagatgaggccaagaagtgcggtgctcacattaagcgcagcgtggcttccaggtggaaggccccaaacttctactatcacctcagaaatggcgggcacgttgcggccgtacggtcccacgaactgagccggtttttcttccgggcagatttggacgatttctttgggagagtgaaccggtctcgcgtgacccggtgccttaaaccttggttctcatacgccgaagcaagggagatggcctcagaatctgtcgtgaagcgacctggagagacagcctttgtgctgccgtatgggttcgtgcagagccctatcctcgcatccttggccctggacaagagtaaactgggtagcctgctgagatcactggacgggggccgcgatttcacggtgagcgtctatgtcgacgacatcattatctctggagacgacgaagctcaacttaaagaggtagcatcccgccttgagagagtggcgagtgaggccctgtttccactcagcagtggcaaaactcagggacccgcctctggagtgactgtttttaacatagaactgtcccatagaatgctcaggattaccgatgataggctcgcttcactgaggctcgactatcaggcgactgcatctgagcattgtaaagctggcatcgtctcctacgtatacagtgtgaatccagatcaggtcgctcaagtgacaagtggtggcagctccggcggctcttctggctccgaaactcctggcacttctgaatccgccaccccagagagtagtggcggtagctcaggcggaagtgcatgccagaacaagaagaacgtcgactactacgtcggcctggacatgggagatgcctctgttggatgggccgtgaccgacctgaactacaacatcctgaagttcaacggcaaggccctgtggggcatcagactgttcgattctgccgaaaccgccgctgccagaagaggctttagatctgccaggcggcggatcgacagagtgtcttggagaatctccatgctgcaagagctgttcgccgacgagatcgccaaagtggatgccggcttcttccagcggctgaaggatagcagactgcaggtcgaggacaagcaagagaaaaccgcctacaacctgttcgtgggccagaactacaccgacaaggacttctaccagcagtaccccaccatgtaccacctgagatacgccctggctacacaggccggaccttttgatgtgcggctgctgtatctggccgtgcagcacatcgtgaagcaccggggccactttctgttcgagaacctggacgccagcaaagtgggcgatttcgtggccgtgtttggcgaggtggaaagctacgtgcacgacgagatggaactggacgagtggtactgccacgacatcgatgccctggccaaggtgctgtgcaatgccaatctgggcatcaccgccaagcagaaggccatccagaatctgctgcccgccaagaccaagcaagaaaaggccatcgtgcagctgctgagcggcggaaaggccaagctgtgcgacctgttctgtgacgaggaactggccgaatgcgagaaaaagagcatcagcttccaagaggacaacctcgatgagctggaacccatcctggaagctatcctgcaagagagatacgaggccctgctgcggttcaaggccgtgtatgattggagcctgctggccaagatcctgagactggacgccgacaagaaaagcgagaacgagatgcacctcctgagcgagtgcaaagtgaaggtgtacgaggaacacaagaaagacctggctgtgctgaagtccatgctgaagggcaagcccctgtacaacaagctgttcagacaggacggcgaggacacctacgccaattacgcccagggaatcaaagggatcaaccaggtggacttctgcaagtccctgaagaagcagctggaatctatcggcgagtacaagaaacagatgcagcagctgaccagcttcgaggacgcccagaccgatgtggaaagactgctgtttagagtggccaacggcctggctttccccaagcagaccaccaaggacaacggcatcatcccaatccaggttcacctggccgagctgcagtgtatcctggctcacgccgagaagtacctgcctttcctgaagaacgccgacgccaatggcctgagcgtgcgggaaaagatcacccagatcgtgaagttcagaatcccctactacgtgggacccctggccggcacaagactgtctagagaacagggcagatgctgggtcgagcggagagccgagctgaagaatgagaagatctacccctggaacttcgacaaggtggtggacctggaagcctccgccgagaacttcatcaccaacatgaccgccaagtgcacctacctcgtgggcgaagatgtgctccccaaagagtccctgctgtactccgagttcatggtccgaaacgccctgaacaacctgaccatcgacggcgagagactgcccgtttctctgctgcagaaaatctacaagcagctgttcctggaaaagaccttcaaagtgaccaagaaggccctggaacggttcttcaaacaagagaatgtgtcctaccacgatatcggcggcatcgacgacaagatcaacgcctccatgaaggcctacaacgacttcaagcggatcttcggcgaggcctacatcgaaatgcaccgggatgagatcgagaacatcatccggtggatcaccctgttttgcgacgagaagaagatgctcgagacaaagatccgcaagacgtaccctcagatccccgatgataagatcaaggccattaagaagctgaagtacaaggactggggcagactgagcgccacactgctggattctggcaagatcgcctacgaggatgccagcgtgggcgagagaatcaccatcatctctgccctgcggcacaccaacaagaatttcatggaactgctgagcagcaactgccagtacgacttcatcggcaagattaaggacttcaacggctccaagcagagcgacaatggcaagctgacctacaaggatgtggaagaactgtacgtgtcccctagcgtgaagcggagcatctggcagaccctgaccattctggaagagatcaagaaaatcatgggctgcgagcccaagcgcatcttcatcgagatggccagaagcaaagaggaaagcctgcggaccaacagcaggctgcagagactccaggacctgtacaagaagtgcaaagaagagaacatcgacttcatgcccaaggccgacgagctgaccgacatcagatctcagctccagtgcaagaacgaagaggacctgcggagcgacaagctgtacctgtactacacccagatggggagatgcatgtacaccggcgagaggatcgaactggccagcctgtacgaccagaacaaatacgacgtggacgccatctaccccaggtctaagaccaaggacgacagcctgaacaatcgggtgctcgtgaagaaagagattaacagcgccaagacagacaactaccccatcgacgctgacatccggaagaaaatgcacgccttttggaagatgctgtacgacaagggcttcatcgaccaaaagaagtacgagcggctgaccagaagcacccagctgacagatgaagaactggctggcttcatcaaccggcagctggtggaaaccagacagagcacaaaggccaccgccgacattctgaagtctgcctacgagcacagcgaggtggtgtatgtgaaggccggcaacgtgtccgatttccggcagcagttcgacttcgtgaagtgccgggaagtgaacgacctgcaccacgccaaggacgcctacctgaatatcgtcgtgggcaactgctaccacgtcaagttcaccatcaatccgctgatgttcatccggggcaaccaggacaaccggcggtactctctgaagcccgaggtgttctacgcccacgacattaagcggaacggggagattgcttggctggccggcgataatggcaccatggccacagtgaagagagtgatgcagaaaaacaacgtgctgttcacccggctggccgtggaaggcaaaggcgagctgttcaagcagaaccctctgaaggccaagagcggccagctgcctcttaaagccggcctgagcatcgataagtatggcggctacgactccctgagcaccgcctattttgccctggtggaatccgagggcaagaaaggcgccgtgcagtttacaatcgaggccattcctctggtgtacgccaaacagggcgaagccaccatcaagaaatacctgacagaggtggtgcagctgtgcaagcccgagatcaaagtgatgcggatcaagaagtactccctgctgaagatcaatggcttccccatgcacatctccggcagaaccggaaagcagctgatcttctacgtggccagccagctgtgtatcgacgagaacagcgtggcctatctgaagaaagccctgaagtatgagagcaacctcgaggaaaacgaggccatcctggccgataagaatgccgacgagtccatgaagcagaaagccttcaaccggctcatgttctacaaggacacctggggaatcagcgccgaggctaacctgcagctgtacgatatgctgctggctaagagcgccaacaacctctacaagaacagacccgccagccagaccgccactctgaaagagaagagagagcagttcgccaagctgagcctgagcaagcagatccacgtgatcaaagagatcctgaacctgttcaagtgcgcctccgccagcgccgatttcaagctgcttgataagggcgctgcctgcggcatcctgaaagtgtccaacaacatcaccaagctgaagcagtgcgtgctgatcaatcagagccccaccggcgtgttcgagcaagaggttgacctgatgagactgcctaggggcggcggaggcagctacccctatgatgtacctgattatgcttctggcggacccaagaagaagaggaaagtcggtggttctcctaagaaaaagagaaaggtcggatccggc

SEQ ID NO: 1703 - DNA, 759 bp, synthetic construct; identical to SEQ ID NO: 1250
  source 1..759: mol_type = other DNA; note = MG160-473_cloned_into_tethered_plasmid

SEQ ID NO: 1704 - DNA, 5106 bp, synthetic construct
  source 1..5106: mol_type = other DNA; note mammalian_codon_optimized_tethered_system_MG160-473_MG71-2n _7AA_linker
atgaagaggaccgctgatggttccgaatttgaatctcctaagaagaaacgaaaggttatggaagcctggaaacataagtttgagatcaagaaggacaggtgggtccacgtaccaagcaaggacatggtgatcttcgggaaaaagttgcacaaatttatcagaagaaagtggaatcctcccttttactactatcacctccggaacgggggtcatgttattgccgctaagaatcacaaacataatgactttttcagtgctatagatatatctaacttcttcgaatcaacatcacaaagcagggtgacccgcgagcttaagactatcctcccatataatcaggcccgggaggtcgcaaagatttcaacggtccgagtgcccggaagcaaggataaaaagttctcaatcccttatggctacccacagtcccctatacttgctagtttctgtttgcgaaactcctacgtaggcaatgtgctggacagcatcaataaaggtggacttatcctggtgtctgtctatatggatgatatagtgctgtcttccaaagacctcaatgtgttgaacgatgcatttaatctgatttgcaacgcccttaaaaaaagtcactaccagattaacattgacaaaacccagcccccgagcgaaaagatcagggttttcaacctggagctgtctcatgaccagatcaaggtgtgctccgatcgcctcattcagttcattcaggcctacgcaaaaacacagaacgagtttgaacggaaaggcatcgctgcatatattagaagtgttaaccctcaacaagccaatctgcactttccccctgcccccgccccagccccagcatgccagaacaagaagaacgtcgactactacgtcggcctggacatgggagatgcctctgttggatgggccgtgaccgacctgaactacaacatcctgaagttcaacggcaaggccctgtggggcatcagactgttcgattctgccgaaaccgccgctgccagaagaggctttagatctgccaggcggcggatcgacagagtgtcttggagaatctccatgctgcaagagctgttcgccgacgagatcgccaaagtggatgccggcttcttccagcggctgaaggatagcagactgcaggtcgaggacaagcaagagaaaaccgcctacaacctgttcgtgggccagaactacaccgacaaggacttctaccagcagtaccccaccatgtaccacctgagatacgccctggctacacaggccggaccttttgatgtgcggctgctgtatctggccgtgcagcacatcgtgaagcaccggggccactttctgttcgagaacctggacgccagcaaagtgggcgatttcgtggccgtgtttggcgaggtggaaagctacgtgcacgacgagatggaactggacgagtggtactgccacgacatcgatgccctggccaaggtgctgtgcaatgccaatctgggcatcaccgccaagcagaaggccatccagaatctgctgcccgccaagaccaagcaagaaaaggccatcgtgcagctgctgagcggcggaaaggccaagctgtgcgacctgttctgtgacgaggaactggccgaatgcgagaaaaagagcatcagcttccaagaggacaacctcgatgagctggaacccatcctggaagctatcctgcaagagagatacgaggccctgctgcggttcaaggccgtgtatgattggagcctgctggccaagatcctgagactggacgccgacaagaaaagcgagaacgagatgcacctcctgagcgagtgcaaagtgaaggtgtacgaggaacacaagaaagacctggctgtgctgaagtccatgctgaagggcaagcccctgtacaacaagctgttcagacaggacggcgaggacacctacgccaattacgcccagggaatcaaagggatcaaccaggtggacttctgcaagtccctgaagaagcagctggaatctatcggcgagtacaagaaacagatgcagcagctgaccagcttcgaggacgcccagaccgatgtggaaagactgctgtttagagtggccaacggcctggctttccccaagcagaccaccaaggacaacggcatcatcccaatccaggttcacctggccgagctgcagtgtatcctggctcacgccgagaagtacctgcctttcctgaagaacgccgacgccaatggcctgagcgtgcgggaaaagatcacccagatcgtgaagttcagaatcccctactacgtgggacccctggccggcacaagactgtctagagaacagggcagatgctgggtcgagcggagagccgagctgaagaatgagaagatctacccctggaacttcgacaaggtggtggacctggaagcctccgccgagaacttcatcaccaacatgaccgccaagtgcacctacctcgtgggcgaagatgtgctccccaaagagtccctgctgtactccgagttcatggtccgaaacgccctgaacaacctgaccatcgacggcgagagactgcccgtttctctgctgcagaaaatctacaagcagctgttcctggaaaagaccttcaaagtgaccaagaaggccctggaacggttcttcaaacaagagaatgtgtcctaccacgatatcggcggcatcgacgacaagatcaacgcctccatgaaggcctacaacgacttcaagcggatcttcggcgaggcctacatcgaaatgcaccgggatgagatcgagaacatcatccggtggatcaccctgttttgcgacgagaagaagatgctcgagacaaagatccgcaagacgtaccctcagatccccgatgataagatcaaggccattaagaagctgaagtacaaggactggggcagactgagcgccacactgctggattctggcaagatcgcctacgaggatgccagcgtgggcgagagaatcaccatcatctctgccctgcggcacaccaacaagaatttcatggaactgctgagcagcaactgccagtacgacttcatcggcaagattaaggacttcaacggctccaagcagagcgacaatggcaagctgacctacaaggatgtggaagaactgtacgtgtcccctagcgtgaagcggagcatctggcagaccctgaccattctggaagagatcaagaaaatcatgggctgcgagcccaagcgcatcttcatcgagatggccagaagcaaagaggaaagcctgcggaccaacagcaggctgcagagactccaggacctgtacaagaagtgcaaagaagagaacatcgacttcatgcccaaggccgacgagctgaccgacatcagatctcagctccagtgcaagaacgaagaggacctgcggagcgacaagctgtacctgtactacacccagatggggagatgcatgtacaccggcgagaggatcgaactggccagcctgtacgaccagaacaaatacgacgtggacgccatctaccccaggtctaagaccaaggacgacagcctgaacaatcgggtgctcgtgaagaaagagattaacagcgccaagacagacaactaccccatcgacgctgacatccggaagaaaatgcacgccttttggaagatgctgtacgacaagggcttcatcgaccaaaagaagtacgagcggctgaccagaagcacccagctgacagatgaagaactggctggcttcatcaaccggcagctggtggaaaccagacagagcacaaaggccaccgccgacattctgaagtctgcctacgagcacagcgaggtggtgtatgtgaaggccggcaacgtgtccgatttccggcagcagttcgacttcgtgaagtgccgggaagtgaacgacctgcaccacgccaaggacgcctacctgaatatcgtcgtgggcaactgctaccacgtcaagttcaccatcaatccgctgatgttcatccggggcaaccaggacaaccggcggtactctctgaagcccgaggtgttctacgcccacgacattaagcggaacggggagattgcttggctggccggcgataatggcaccatggccacagtgaagagagtgatgcagaaaaacaacgtgctgttcacccggctggccgtggaaggcaaaggcgagctgttcaagcagaaccctctgaaggccaagagcggccagctgcctcttaaagccggcctgagcatcgataagtatggcggctacgactccctgagcaccgcctattttgccctggtggaatccgagggcaagaaaggcgccgtgcagtttacaatcgaggccattcctctggtgtacgccaaacagggcgaagccaccatcaagaaatacctgacagaggtggtgcagctgtgcaagcccgagatcaaagtgatgcggatcaagaagtactccctgctgaagatcaatggcttccccatgcacatctccggcagaaccggaaagcagctgatcttctacgtggccagccagctgtgtatcgacgagaacagcgtggcctatctgaagaaagccctgaagtatgagagcaacctcgaggaaaacgaggccatcctggccgataagaatgccgacgagtccatgaagcagaaagccttcaaccggctcatgttctacaaggacacctggggaatcagcgccgaggctaacctgcagctgtacgatatgctgctggctaagagcgccaacaacctctacaagaacagacccgccagccagaccgccactctgaaagagaagagagagcagttcgccaagctgagcctgagcaagcagatccacgtgatcaaagagatcctgaacctgttcaagtgcgcctccgccagcgccgatttcaagctgcttgataagggcgctgcctgcggcatcctgaaagtgtccaacaacatcaccaagctgaagcagtgcgtgctgatcaatcagagccccaccggcgtgttcgagcaagaggttgacctgatgagactgcctaggggcggcggaggcagctacccctatgatgtacctgattatgcttctggcggacccaagaagaagaggaaagtcggtggttctcctaagaaaaagagaaaggtcggatccggc

SEQ ID NO: 1705 - DNA, 5127 bp, synthetic construct
  source 1..5127: mol_type = other DNA; note mammalian_codon_optimized_tethered_system_MG160-473_MG71-2n _14AA_linker
atgaagaggaccgctgatggttccgaatttgaatctcctaagaagaaacgaaaggttatggaagcctggaaacataagtttgagatcaagaaggacaggtgggtccacgtaccaagcaaggacatggtgatcttcgggaaaaagttgcacaaatttatcagaagaaagtggaatcctcccttttactactatcacctccggaacgggggtcatgttattgccgctaagaatcacaaacataatgactttttcagtgctatagatatatctaacttcttcgaatcaacatcacaaagcagggtgacccgcgagcttaagactatcctcccatataatcaggcccgggaggtcgcaaagatttcaacggtccgagtgcccggaagcaaggataaaaagttctcaatcccttatggctacccacagtcccctatacttgctagtttctgtttgcgaaactcctacgtaggcaatgtgctggacagcatcaataaaggtggacttatcctggtgtctgtctatatggatgatatagtgctgtcttccaaagacctcaatgtgttgaacgatgcatttaatctgatttgcaacgcccttaaaaaaagtcactaccagattaacattgacaaaacccagcccccgagcgaaaagatcagggttttcaacctggagctgtctcatgaccagatcaaggtgtgctccgatcgcctcattcagttcattcaggcctacgcaaaaacacagaacgagtttgaacggaaaggcatcgctgcatatattagaagtgttaaccctcaacaagccaatctgcactttcccaaattaggaggaggtgcccctgctgtcggaggaggtccaaaggcatgccagaacaagaagaacgtcgactactacgtcggcctggacatgggagatgcctctgttggatgggccgtgaccgacctgaactacaacatcctgaagttcaacggcaaggccctgtggggcatcagactgttcgattctgccgaaaccgccgctgccagaagaggctttagatctgccaggcggcggatcgacagagtgtcttggagaatctccatgctgcaagagctgttcgccgacgagatcgccaaagtggatgccggcttcttccagcggctgaaggatagcagactgcaggtcgaggacaagcaagagaaaaccgcctacaacctgttcgtgggccagaactacaccgacaaggacttctaccagcagtaccccaccatgtaccacctgagatacgccctggctacacaggccggaccttttgatgtgcggctgctgtatctggccgtgcagcacatcgtgaagcaccggggccactttctgttcgagaacctggacgccagcaaagtgggcgatttcgtggccgtgtttggcgaggtggaaagctacgtgcacgacgagatggaactggacgagtggtactgccacgacatcgatgccctggccaaggtgctgtgcaatgccaatctgggcatcaccgccaagcagaaggccatccagaatctgctgcccgccaagaccaagcaagaaaaggccatcgtgcagctgctgagcggcggaaaggccaagctgtgcgacctgttctgtgacgaggaactggccgaatgcgagaaaaagagcatcagcttccaagaggacaacctcgatgagctggaacccatcctggaagctatcctgcaagagagatacgaggccctgctgcggttcaaggccgtgtatgattggagcctgctggccaagatcctgagactggacgccgacaagaaaagcgagaacgagatgcacctcctgagcgagtgcaaagtgaaggtgtacgaggaacacaagaaagacctggctgtgctgaagtccatgctgaagggcaagcccctgtacaacaagctgttcagacaggacggcgaggacacctacgccaattacgcccagggaatcaaagggatcaaccaggtggacttctgcaagtccctgaagaagcagctggaatctatcggcgagtacaagaaacagatgcagcagctgaccagcttcgaggacgcccagaccgatgtggaaagactgctgtttagagtggccaacggcctggctttccccaagcagaccaccaaggacaacggcatcatcccaatccaggttcacctggccgagctgcagtgtatcctggctcacgccgagaagtacctgcctttcctgaagaacgccgacgccaatggcctgagcgtgcgggaaaagatcacccagatcgtgaagttcagaatcccctactacgtgggacccctggccggcacaagactgtctagagaacagggcagatgctgggtcgagcggagagccgagctgaagaatgagaagatctacccctggaacttcgacaaggtggtggacctggaagcctccgccgagaacttcatcaccaacatgaccgccaagtgcacctacctcgtgggcgaagatgtgctccccaaagagtccctgctgtactccgagttcatggtccgaaacgccctgaacaacctgaccatcgacggcgagagactgcccgtttctctgctgcagaaaatctacaagcagctgttcctggaaaagaccttcaaagtgaccaagaaggccctggaacggttcttcaaacaagagaatgtgtcctaccacgatatcggcggcatcgacgacaagatcaacgcctccatgaaggcctacaacgacttcaagcggatcttcggcgaggcctacatcgaaatgcaccgggatgagatcgagaacatcatccggtggatcaccctgttttgcgacgagaagaagatgctcgagacaaagatccgcaagacgtaccctcagatccccgatgataagatcaaggccattaagaagctgaagtacaaggactggggcagactgagcgccacactgctggattctggcaagatcgcctacgaggatgccagcgtgggcgagagaatcaccatcatctctgccctgcggcacaccaacaagaatttcatggaactgctgagcagcaactgccagtacgacttcatcggcaagattaaggacttcaacggctccaagcagagcgacaatggcaagctgacctacaaggatgtggaagaactgtacgtgtcccctagcgtgaagcggagcatctggcagaccctgaccattctggaagagatcaagaaaatcatgggctgcgagcccaagcgcatcttcatcgagatggccagaagcaaagaggaaagcctgcggaccaacagcaggctgcagagactccaggacctgtacaagaagtgcaaagaagagaacatcgacttcatgcccaaggccgacgagctgaccgacatcagatctcagctccagtgcaagaacgaagaggacctgcggagcgacaagctgtacctgtactacacccagatggggagatgcatgtacaccggcgagaggatcgaactggccagcctgtacgaccagaacaaatacgacgtggacgccatctaccccaggtctaagaccaaggacgacagcctgaacaatcgggtgctcgtgaagaaagagattaacagcgccaagacagacaactaccccatcgacgctgacatccggaagaaaatgcacgccttttggaagatgctgtacgacaagggcttcatcgaccaaaagaagtacgagcggctgaccagaagcacccagctgacagatgaagaactggctggcttcatcaaccggcagctggtggaaaccagacagagcacaaaggccaccgccgacattctgaagtctgcctacgagcacagcgaggtggtgtatgtgaaggccggcaacgtgtccgatttccggcagcagttcgacttcgtgaagtgccgggaagtgaacgacctgcaccacgccaaggacgcctacctgaatatcgtcgtgggcaactgctaccacgtcaagttcaccatcaatccgctgatgttcatccggggcaaccaggacaaccggcggtactctctgaagcccgaggtgttctacgcccacgacattaagcggaacggggagattgcttggctggccggcgataatggcaccatggccacagtgaagagagtgatgcagaaaaacaacgtgctgttcacccggctggccgtggaaggcaaaggcgagctgttcaagcagaaccctctgaaggccaagagcggccagctgcctcttaaagccggcctgagcatcgataagtatggcggctacgactccctgagcaccgcctattttgccctggtggaatccgagggcaagaaaggcgccgtgcagtttacaatcgaggccattcctctggtgtacgccaaacagggcgaagccaccatcaagaaatacctgacagaggtggtgcagctgtgcaagcccgagatcaaagtgatgcggatcaagaagtactccctgctgaagatcaatggcttccccatgcacatctccggcagaaccggaaagcagctgatcttctacgtggccagccagctgtgtatcgacgagaacagcgtggcctatctgaagaaagccctgaagtatgagagcaacctcgaggaaaacgaggccatcctggccgataagaatgccgacgagtccatgaagcagaaagccttcaaccggctcatgttctacaaggacacctggggaatcagcgccgaggctaacctgcagctgtacgatatgctgctggctaagagcgccaacaacctctacaagaacagacccgccagccagaccgccactctgaaagagaagagagagcagttcgccaagctgagcctgagcaagcagatccacgtgatcaaagagatcctgaacctgttcaagtgcgcctccgccagcgccgatttcaagctgcttgataagggcgctgcctgcggcatcctgaaagtgtccaacaacatcaccaagctgaagcagtgcgtgctgatcaatcagagccccaccggcgtgttcgagcaagaggttgacctgatgagactgcctaggggcggcggaggcagctacccctatgatgtacctgattatgcttctggcggacccaagaagaagaggaaagtcggtggttctcctaagaaaaagagaaaggtcggatccggc

SEQ ID NO: 1706 - DNA, 5130 bp, synthetic construct
  source 1..5130: mol_type = other DNA; note mammalian_codon_optimized_tethered_system_MG160-473_MG71-2n _15AA_linker
atgaagaggaccgctgatggttccgaatttgaatctcctaagaagaaacgaaaggttatggaagcctggaaacataagtttgagatcaagaaggacaggtgggtccacgtaccaagcaaggacatggtgatcttcgggaaaaagttgcacaaatttatcagaagaaagtggaatcctcccttttactactatcacctccggaacgggggtcatgttattgccgctaagaatcacaaacataatgactttttcagtgctatagatatatctaacttcttcgaatcaacatcacaaagcagggtgacccgcgagcttaagactatcctcccatataatcaggcccgggaggtcgcaaagatttcaacggtccgagtgcccggaagcaaggataaaaagttctcaatcccttatggctacccacagtcccctatacttgctagtttctgtttgcgaaactcctacgtaggcaatgtgctggacagcatcaataaaggtggacttatcctggtgtctgtctatatggatgatatagtgctgtcttccaaagacctcaatgtgttgaacgatgcatttaatctgatttgcaacgcccttaaaaaaagtcactaccagattaacattgacaaaacccagcccccgagcgaaaagatcagggttttcaacctggagctgtctcatgaccagatcaaggtgtgctccgatcgcctcattcagttcattcaggcctacgcaaaaacacagaacgagtttgaacggaaaggcatcgctgcatatattagaagtgttaaccctcaacaagccaatctgcactttcccggcggaggaggaagcggtggaggaggctctggcggcggtggctcagcatgccagaacaagaagaacgtcgactactacgtcggcctggacatgggagatgcctctgttggatgggccgtgaccgacctgaactacaacatcctgaagttcaacggcaaggccctgtggggcatcagactgttcgattctgccgaaaccgccgctgccagaagaggctttagatctgccaggcggcggatcgacagagtgtcttggagaatctccatgctgcaagagctgttcgccgacgagatcgccaaagtggatgccggcttcttccagcggctgaaggatagcagactgcaggtcgaggacaagcaagagaaaaccgcctacaacctgttcgtgggccagaactacaccgacaaggacttctaccagcagtaccccaccatgtaccacctgagatacgccctggctacacaggccggaccttttgatgtgcggctgctgtatctggccgtgcagcacatcgtgaagcaccggggccactttctgttcgagaacctggacgccagcaaagtgggcgatttcgtggccgtgtttggcgaggtggaaagctacgtgcacgacgagatggaactggacgagtggtactgccacgacatcgatgccctggccaaggtgctgtgcaatgccaatctgggcatcaccgccaagcagaaggccatccagaatctgctgcccgccaagaccaagcaagaaaaggccatcgtgcagctgctgagcggcggaaaggccaagctgtgcgacctgttctgtgacgaggaactggccgaatgcgagaaaaagagcatcagcttccaagaggacaacctcgatgagctggaacccatcctggaagctatcctgcaagagagatacgaggccctgctgcggttcaaggccgtgtatgattggagcctgctggccaagatcctgagactggacgccgacaagaaaagcgagaacgagatgcacctcctgagcgagtgcaaagtgaaggtgtacgaggaacacaagaaagacctggctgtgctgaagtccatgctgaagggcaagcccctgtacaacaagctgttcagacaggacggcgaggacacctacgccaattacgcccagggaatcaaagggatcaaccaggtggacttctgcaagtccctgaagaagcagctggaatctatcggcgagtacaagaaacagatgcagcagctgaccagcttcgaggacgcccagaccgatgtggaaagactgctgtttagagtggccaacggcctggctttccccaagcagaccaccaaggacaacggcatcatcccaatccaggttcacctggccgagctgcagtgtatcctggctcacgccgagaagtacctgcctttcctgaagaacgccgacgccaatggcctgagcgtgcgggaaaagatcacccagatcgtgaagttcagaatcccctactacgtgggacccctggccggcacaagactgtctagagaacagggcagatgctgggtcgagcggagagccgagctgaagaatgagaagatctacccctggaacttcgacaaggtggtggacctggaagcctccgccgagaacttcatcaccaacatgaccgccaagtgcacctacctcgtgggcgaagatgtgctccccaaagagtccctgctgtactccgagttcatggtccgaaacgccctgaacaacctgaccatcgacggcgagagactgcccgtttctctgctgcagaaaatctacaagcagctgttcctggaaaagaccttcaaagtgaccaagaaggccctggaacggttcttcaaacaagagaatgtgtcctaccacgatatcggcggcatcgacgacaagatcaacgcctccatgaaggcctacaacgacttcaagcggatcttcggcgaggcctacatcgaaatgcaccgggatgagatcgagaacatcatccggtggatcaccctgttttgcgacgagaagaagatgctcgagacaaagatccgcaagacgtaccctcagatccccgatgataagatcaaggccattaagaagctgaagtacaaggactggggcagactgagcgccacactgctggattctggcaagatcgcctacgaggatgccagcgtgggcgagagaatcaccatcatctctgccctgcggcacaccaacaagaatttcatggaactgctgagcagcaactgccagtacgacttcatcggcaagattaaggacttcaacggctccaagcagagcgacaatggcaagctgacctacaaggatgtggaagaactgtacgtgtcccctagcgtgaagcggagcatctggcagaccctgaccattctggaagagatcaagaaaatcatgggctgcgagcccaagcgcatcttcatcgagatggccagaagcaaagaggaaagcctgcggaccaacagcaggctgcagagactccaggacctgtacaagaagtgcaaagaagagaacatcgacttcatgcccaaggccgacgagctgaccgacatcagatctcagctccagtgcaagaacgaagaggacctgcggagcgacaagctgtacctgtactacacccagatggggagatgcatgtacaccggcgagaggatcgaactggccagcctgtacgaccagaacaaatacgacgtggacgccatctaccccaggtctaagaccaaggacgacagcctgaacaatcgggtgctcgtgaagaaagagattaacagcgccaagacagacaactaccccatcgacgctgacatccggaagaaaatgcacgccttttggaagatgctgtacgacaagggcttcatcgaccaaaagaagtacgagcggctgaccagaagcacccagctgacagatgaagaactggctggcttcatcaaccggcagctggtggaaaccagacagagcacaaaggccaccgccgacattctgaagtctgcctacgagcacagcgaggtggtgtatgtgaaggccggcaacgtgtccgatttccggcagcagttcgacttcgtgaagtgccgggaagtgaacgacctgcaccacgccaaggacgcctacctgaatatcgtcgtgggcaactgctaccacgtcaagttcaccatcaatccgctgatgttcatccggggcaaccaggacaaccggcggtactctctgaagcccgaggtgttctacgcccacgacattaagcggaacggggagattgcttggctggccggcgataatggcaccatggccacagtgaagagagtgatgcagaaaaacaacgtgctgttcacccggctggccgtggaaggcaaaggcgagctgttcaagcagaaccctctgaaggccaagagcggccagctgcctcttaaagccggcctgagcatcgataagtatggcggctacgactccctgagcaccgcctattttgccctggtggaatccgagggcaagaaaggcgccgtgcagtttacaatcgaggccattcctctggtgtacgccaaacagggcgaagccaccatcaagaaatacctgacagaggtggtgcagctgtgcaagcccgagatcaaagtgatgcggatcaagaagtactccctgctgaagatcaatggcttccccatgcacatctccggcagaaccggaaagcagctgatcttctacgtggccagccagctgtgtatcgacgagaacagcgtggcctatctgaagaaagccctgaagtatgagagcaacctcgaggaaaacgaggccatcctggccgataagaatgccgacgagtccatgaagcagaaagccttcaaccggctcatgttctacaaggacacctggggaatcagcgccgaggctaacctgcagctgtacgatatgctgctggctaagagcgccaacaacctctacaagaacagacccgccagccagaccgccactctgaaagagaagagagagcagttcgccaagctgagcctgagcaagcagatccacgtgatcaaagagatcctgaacctgttcaagtgcgcctccgccagcgccgatttcaagctgcttgataagggcgctgcctgcggcatcctgaaagtgtccaacaacatcaccaagctgaagcagtgcgtgctgatcaatcagagccccaccggcgtgttcgagcaagaggttgacctgatgagactgcctaggggcggcggaggcagctacccctatgatgtacctgattatgcttctggcggacccaagaagaagaggaaagtcggtggttctcctaagaaaaagagaaaggtcggatccggc

SEQ ID NO: 1707 - DNA, 5133 bp, synthetic construct
  source 1..5133: mol_type = other DNA; note mammalian_codon_optimized_tethered_system_MG160-473_MG71-2n _16AA_linker
atgaagaggaccgctgatggttccgaatttgaatctcctaagaagaaacgaaaggttatggaagcctggaaacataagtttgagatcaagaaggacaggtgggtccacgtaccaagcaaggacatggtgatcttcgggaaaaagttgcacaaatttatcagaagaaagtggaatcctcccttttactactatcacctccggaacgggggtcatgttattgccgctaagaatcacaaacataatgactttttcagtgctatagatatatctaacttcttcgaatcaacatcacaaagcagggtgacccgcgagcttaagactatcctcccatataatcaggcccgggaggtcgcaaagatttcaacggtccgagtgcccggaagcaaggataaaaagttctcaatcccttatggctacccacagtcccctatacttgctagtttctgtttgcgaaactcctacgtaggcaatgtgctggacagcatcaataaaggtggacttatcctggtgtctgtctatatggatgatatagtgctgtcttccaaagacctcaatgtgttgaacgatgcatttaatctgatttgcaacgcccttaaaaaaagtcactaccagattaacattgacaaaacccagcccccgagcgaaaagatcagggttttcaacctggagctgtctcatgaccagatcaaggtgtgctccgatcgcctcattcagttcattcaggcctacgcaaaaacacagaacgagtttgaacggaaaggcatcgctgcatatattagaagtgttaaccctcaacaagccaatctgcactttccctccgggagcgaaacacctgggacttctgaaagcgctactcccgagtctgcatgccagaacaagaagaacgtcgactactacgtcggcctggacatgggagatgcctctgttggatgggccgtgaccgacctgaactacaacatcctgaagttcaacggcaaggccctgtggggcatcagactgttcgattctgccgaaaccgccgctgccagaagaggctttagatctgccaggcggcggatcgacagagtgtcttggagaatctccatgctgcaagagctgttcgccgacgagatcgccaaagtggatgccggcttcttccagcggctgaaggatagcagactgcaggtcgaggacaagcaagagaaaaccgcctacaacctgttcgtgggccagaactacaccgacaaggacttctaccagcagtaccccaccatgtaccacctgagatacgccctggctacacaggccggaccttttgatgtgcggctgctgtatctggccgtgcagcacatcgtgaagcaccggggccactttctgttcgagaacctggacgccagcaaagtgggcgatttcgtggccgtgtttggcgaggtggaaagctacgtgcacgacgagatggaactggacgagtggtactgccacgacatcgatgccctggccaaggtgctgtgcaatgccaatctgggcatcaccgccaagcagaaggccatccagaatctgctgcccgccaagaccaagcaagaaaaggccatcgtgcagctgctgagcggcggaaaggccaagctgtgcgacctgttctgtgacgaggaactggccgaatgcgagaaaaagagcatcagcttccaagaggacaacctcgatgagctggaacccatcctggaagctatcctgcaagagagatacgaggccctgctgcggttcaaggccgtgtatgattggagcctgctggccaagatcctgagactggacgccgacaagaaaagcgagaacgagatgcacctcctgagcgagtgcaaagtgaaggtgtacgaggaacacaagaaagacctggctgtgctgaagtccatgctgaagggcaagcccctgtacaacaagctgttcagacaggacggcgaggacacctacgccaattacgcccagggaatcaaagggatcaaccaggtggacttctgcaagtccctgaagaagcagctggaatctatcggcgagtacaagaaacagatgcagcagctgaccagcttcgaggacgcccagaccgatgtggaaagactgctgtttagagtggccaacggcctggctttccccaagcagaccaccaaggacaacggcatcatcccaatccaggttcacctggccgagctgcagtgtatcctggctcacgccgagaagtacctgcctttcctgaagaacgccgacgccaatggcctgagcgtgcgggaaaagatcacccagatcgtgaagttcagaatcccctactacgtgggacccctggccggcacaagactgtctagagaacagggcagatgctgggtcgagcggagagccgagctgaagaatgagaagatctacccctggaacttcgacaaggtggtggacctggaagcctccgccgagaacttcatcaccaacatgaccgccaagtgcacctacctcgtgggcgaagatgtgctccccaaagagtccctgctgtactccgagttcatggtccgaaacgccctgaacaacctgaccatcgacggcgagagactgcccgtttctctgctgcagaaaatctacaagcagctgttcctggaaaagaccttcaaagtgaccaagaaggccctggaacggttcttcaaacaagagaatgtgtcctaccacgatatcggcggcatcgacgacaagatcaacgcctccatgaaggcctacaacgacttcaagcggatcttcggcgaggcctacatcgaaatgcaccgggatgagatcgagaacatcatccggtggatcaccctgttttgcgacgagaagaagatgctcgagacaaagatccgcaagacgtaccctcagatccccgatgataagatcaaggccattaagaagctgaagtacaaggactggggcagactgagcgccacactgctggattctggcaagatcgcctacgaggatgccagcgtgggcgagagaatcaccatcatctctgccctgcggcacaccaacaagaatttcatggaactgctgagcagcaactgccagtacgacttcatcggcaagattaaggacttcaacggctccaagcagagcgacaatggcaagctgacctacaaggatgtggaagaactgtacgtgtcccctagcgtgaagcggagcatctggcagaccctgaccattctggaagagatcaagaaaatcatgggctgcgagcccaagcgcatcttcatcgagatggccagaagcaaagaggaaagcctgcggaccaacagcaggctgcagagactccaggacctgtacaagaagtgcaaagaagagaacatcgacttcatgcccaaggccgacgagctgaccgacatcagatctcagctccagtgcaagaacgaagaggacctgcggagcgacaagctgtacctgtactacacccagatggggagatgcatgtacaccggcgagaggatcgaactggccagcctgtacgaccagaacaaatacgacgtggacgccatctaccccaggtctaagaccaaggacgacagcctgaacaatcgggtgctcgtgaagaaagagattaacagcgccaagacagacaactaccccatcgacgctgacatccggaagaaaatgcacgccttttggaagatgctgtacgacaagggcttcatcgaccaaaagaagtacgagcggctgaccagaagcacccagctgacagatgaagaactggctggcttcatcaaccggcagctggtggaaaccagacagagcacaaaggccaccgccgacattctgaagtctgcctacgagcacagcgaggtggtgtatgtgaaggccggcaacgtgtccgatttccggcagcagttcgacttcgtgaagtgccgggaagtgaacgacctgcaccacgccaaggacgcctacctgaatatcgtcgtgggcaactgctaccacgtcaagttcaccatcaatccgctgatgttcatccggggcaaccaggacaaccggcggtactctctgaagcccgaggtgttctacgcccacgacattaagcggaacggggagattgcttggctggccggcgataatggcaccatggccacagtgaagagagtgatgcagaaaaacaacgtgctgttcacccggctggccgtggaaggcaaaggcgagctgttcaagcagaaccctctgaaggccaagagcggccagctgcctcttaaagccggcctgagcatcgataagtatggcggctacgactccctgagcaccgcctattttgccctggtggaatccgagggcaagaaaggcgccgtgcagtttacaatcgaggccattcctctggtgtacgccaaacagggcgaagccaccatcaagaaatacctgacagaggtggtgcagctgtgcaagcccgagatcaaagtgatgcggatcaagaagtactccctgctgaagatcaatggcttccccatgcacatctccggcagaaccggaaagcagctgatcttctacgtggccagccagctgtgtatcgacgagaacagcgtggcctatctgaagaaagccctgaagtatgagagcaacctcgaggaaaacgaggccatcctggccgataagaatgccgacgagtccatgaagcagaaagccttcaaccggctcatgttctacaaggacacctggggaatcagcgccgaggctaacctgcagctgtacgatatgctgctggctaagagcgccaacaacctctacaagaacagacccgccagccagaccgccactctgaaagagaagagagagcagttcgccaagctgagcctgagcaagcagatccacgtgatcaaagagatcctgaacctgttcaagtgcgcctccgccagcgccgatttcaagctgcttgataagggcgctgcctgcggcatcctgaaagtgtccaacaacatcaccaagctgaagcagtgcgtgctgatcaatcagagccccaccggcgtgttcgagcaagaggttgacctgatgagactgcctaggggcggcggaggcagctacccctatgatgtacctgattatgcttctggcggacccaagaagaagaggaaagtcggtggttctcctaagaaaaagagaaaggtcggatccggc

SEQ ID NO: 1708 - DNA, 5163 bp, synthetic construct
  source 1..5163: mol_type = other DNA; note mammalian_codon_optimized_tethered_system_MG160-473_MG71-2n _26AA_linker
atgaagaggaccgctgatggttccgaatttgaatctcctaagaagaaacgaaaggttatggaagcctggaaacataagtttgagatcaagaaggacaggtgggtccacgtaccaagcaaggacatggtgatcttcgggaaaaagttgcacaaatttatcagaagaaagtggaatcctcccttttactactatcacctccggaacgggggtcatgttattgccgctaagaatcacaaacataatgactttttcagtgctatagatatatctaacttcttcgaatcaacatcacaaagcagggtgacccgcgagcttaagactatcctcccatataatcaggcccgggaggtcgcaaagatttcaacggtccgagtgcccggaagcaaggataaaaagttctcaatcccttatggctacccacagtcccctatacttgctagtttctgtttgcgaaactcctacgtaggcaatgtgctggacagcatcaataaaggtggacttatcctggtgtctgtctatatggatgatatagtgctgtcttccaaagacctcaatgtgttgaacgatgcatttaatctgatttgcaacgcccttaaaaaaagtcactaccagattaacattgacaaaacccagcccccgagcgaaaagatcagggttttcaacctggagctgtctcatgaccagatcaaggtgtgctccgatcgcctcattcagttcattcaggcctacgcaaaaacacagaacgagtttgaacggaaaggcatcgctgcatatattagaagtgttaaccctcaacaagccaatctgcactttcccggcggcggcggctctggtggcggcggtagcgaagccgccgctgccaaaggtggcggtgggtcaggtggcggcgggtccgcatgccagaacaagaagaacgtcgactactacgtcggcctggacatgggagatgcctctgttggatgggccgtgaccgacctgaactacaacatcctgaagttcaacggcaaggccctgtggggcatcagactgttcgattctgccgaaaccgccgctgccagaagaggctttagatctgccaggcggcggatcgacagagtgtcttggagaatctccatgctgcaagagctgttcgccgacgagatcgccaaagtggatgccggcttcttccagcggctgaaggatagcagactgcaggtcgaggacaagcaagagaaaaccgcctacaacctgttcgtgggccagaactacaccgacaaggacttctaccagcagtaccccaccatgtaccacctgagatacgccctggctacacaggccggaccttttgatgtgcggctgctgtatctggccgtgcagcacatcgtgaagcaccggggccactttctgttcgagaacctggacgccagcaaagtgggcgatttcgtggccgtgtttggcgaggtggaaagctacgtgcacgacgagatggaactggacgagtggtactgccacgacatcgatgccctggccaaggtgctgtgcaatgccaatctgggcatcaccgccaagcagaaggccatccagaatctgctgcccgccaagaccaagcaagaaaaggccatcgtgcagctgctgagcggcggaaaggccaagctgtgcgacctgttctgtgacgaggaactggccgaatgcgagaaaaagagcatcagcttccaagaggacaacctcgatgagctggaacccatcctggaagctatcctgcaagagagatacgaggccctgctgcggttcaaggccgtgtatgattggagcctgctggccaagatcctgagactggacgccgacaagaaaagcgagaacgagatgcacctcctgagcgagtgcaaagtgaaggtgtacgaggaacacaagaaagacctggctgtgctgaagtccatgctgaagggcaagcccctgtacaacaagctgttcagacaggacggcgaggacacctacgccaattacgcccagggaatcaaagggatcaaccaggtggacttctgcaagtccctgaagaagcagctggaatctatcggcgagtacaagaaacagatgcagcagctgaccagcttcgaggacgcccagaccgatgtggaaagactgctgtttagagtggccaacggcctggctttccccaagcagaccaccaaggacaacggcatcatcccaatccaggttcacctggccgagctgcagtgtatcctggctcacgccgagaagtacctgcctttcctgaagaacgccgacgccaatggcctgagcgtgcgggaaaagatcacccagatcgtgaagttcagaatcccctactacgtgggacccctggccggcacaagactgtctagagaacagggcagatgctgggtcgagcggagagccgagctgaagaatgagaagatctacccctggaacttcgacaaggtggtggacctggaagcctccgccgagaacttcatcaccaacatgaccgccaagtgcacctacctcgtgggcgaagatgtgctccccaaagagtccctgctgtactccgagttcatggtccgaaacgccctgaacaacctgaccatcgacggcgagagactgcccgtttctctgctgcagaaaatctacaagcagctgttcctggaaaagaccttcaaagtgaccaagaaggccctggaacggttcttcaaacaagagaatgtgtcctaccacgatatcggcggcatcgacgacaagatcaacgcctccatgaaggcctacaacgacttcaagcggatcttcggcgaggcctacatcgaaatgcaccgggatgagatcgagaacatcatccggtggatcaccctgttttgcgacgagaagaagatgctcgagacaaagatccgcaagacgtaccctcagatccccgatgataagatcaaggccattaagaagctgaagtacaaggactggggcagactgagcgccacactgctggattctggcaagatcgcctacgaggatgccagcgtgggcgagagaatcaccatcatctctgccctgcggcacaccaacaagaatttcatggaactgctgagcagcaactgccagtacgacttcatcggcaagattaaggacttcaacggctccaagcagagcgacaatggcaagctgacctacaaggatgtggaagaactgtacgtgtcccctagcgtgaagcggagcatctggcagaccctgaccattctggaagagatcaagaaaatcatgggctgcgagcccaagcgcatcttcatcgagatggccagaagcaaagaggaaagcctgcggaccaacagcaggctgcagagactccaggacctgtacaagaagtgcaaagaagagaacatcgacttcatgcccaaggccgacgagctgaccgacatcagatctcagctccagtgcaagaacgaagaggacctgcggagcgacaagctgtacctgtactacacccagatggggagatgcatgtacaccggcgagaggatcgaactggccagcctgtacgaccagaacaaatacgacgtggacgccatctaccccaggtctaagaccaaggacgacagcctgaacaatcgggtgctcgtgaagaaagagattaacagcgccaagacagacaactaccccatcgacgctgacatccggaagaaaatgcacgccttttggaagatgctgtacgacaagggcttcatcgaccaaaagaagtacgagcggctgaccagaagcacccagctgacagatgaagaactggctggcttcatcaaccggcagctggtggaaaccagacagagcacaaaggccaccgccgacattctgaagtctgcctacgagcacagcgaggtggtgtatgtgaaggccggcaacgtgtccgatttccggcagcagttcgacttcgtgaagtgccgggaagtgaacgacctgcaccacgccaaggacgcctacctgaatatcgtcgtgggcaactgctaccacgtcaagttcaccatcaatccgctgatgttcatccggggcaaccaggacaaccggcggtactctctgaagcccgaggtgttctacgcccacgacattaagcggaacggggagattgcttggctggccggcgataatggcaccatggccacagtgaagagagtgatgcagaaaaacaacgtgctgttcacccggctggccgtggaaggcaaaggcgagctgttcaagcagaaccctctgaaggccaagagcggccagctgcctcttaaagccggcctgagcatcgataagtatggcggctacgactccctgagcaccgcctattttgccctggtggaatccgagggcaagaaaggcgccgtgcagtttacaatcgaggccattcctctggtgtacgccaaacagggcgaagccaccatcaagaaatacctgacagaggtggtgcagctgtgcaagcccgagatcaaagtgatgcggatcaagaagtactccctgctgaagatcaatggcttccccatgcacatctccggcagaaccggaaagcagctgatcttctacgtggccagccagctgtgtatcgacgagaacagcgtggcctatctgaagaaagccctgaagtatgagagcaacctcgaggaaaacgaggccatcctggccgataagaatgccgacgagtccatgaagcagaaagccttcaaccggctcatgttctacaaggacacctggggaatcagcgccgaggctaacctgcagctgtacgatatgctgctggctaagagcgccaacaacctctacaagaacagacccgccagccagaccgccactctgaaagagaagagagagcagttcgccaagctgagcctgagcaagcagatccacgtgatcaaagagatcctgaacctgttcaagtgcgcctccgccagcgccgatttcaagctgcttgataagggcgctgcctgcggcatcctgaaagtgtccaacaacatcaccaagctgaagcagtgcgtgctgatcaatcagagccccaccggcgtgttcgagcaagaggttgacctgatgagactgcctaggggcggcggaggcagctacccctatgatgtacctgattatgcttctggcggacccaagaagaagaggaaagtcggtggttctcctaagaaaaagagaaaggtcggatccggc

SEQ ID NO: 1709 - DNA, 5181 bp, synthetic construct
  source 1..5181: mol_type = other DNA; note mammalian_codon_optimized_tethered_system_MG160-473_MG71-2n _32AA_linker
atgaagaggaccgctgatggttccgaatttgaatctcctaagaagaaacgaaaggttatggaagcctggaaacataagtttgagatcaagaaggacaggtgggtccacgtaccaagcaaggacatggtgatcttcgggaaaaagttgcacaaatttatcagaagaaagtggaatcctcccttttactactatcacctccggaacgggggtcatgttattgccgctaagaatcacaaacataatgactttttcagtgctatagatatatctaacttcttcgaatcaacatcacaaagcagggtgacccgcgagcttaagactatcctcccatataatcaggcccgggaggtcgcaaagatttcaacggtccgagtgcccggaagcaaggataaaaagttctcaatcccttatggctacccacagtcccctatacttgctagtttctgtttgcgaaactcctacgtaggcaatgtgctggacagcatcaataaaggtggacttatcctggtgtctgtctatatggatgatatagtgctgtcttccaaagacctcaatgtgttgaacgatgcatttaatctgatttgcaacgcccttaaaaaaagtcactaccagattaacattgacaaaacccagcccccgagcgaaaagatcagggttttcaacctggagctgtctcatgaccagatcaaggtgtgctccgatcgcctcattcagttcattcaggcctacgcaaaaacacagaacgagtttgaacggaaaggcatcgctgcatatattagaagtgttaaccctcaacaagccaatctgcactttcccagtggtggcagctccggcggctcttctggctccgaaactcctggcacttctgaatccgccaccccagagagtagtggcggtagctcaggcggaagtgcatgccagaacaagaagaacgtcgactactacgtcggcctggacatgggagatgcctctgttggatgggccgtgaccgacctgaactacaacatcctgaagttcaacggcaaggccctgtggggcatcagactgttcgattctgccgaaaccgccgctgccagaagaggctttagatctgccaggcggcggatcgacagagtgtcttggagaatctccatgctgcaagagctgttcgccgacgagatcgccaaagtggatgccggcttcttccagcggctgaaggatagcagactgcaggtcgaggacaagcaagagaaaaccgcctacaacctgttcgtgggccagaactacaccgacaaggacttctaccagcagtaccccaccatgtaccacctgagatacgccctggctacacaggccggaccttttgatgtgcggctgctgtatctggccgtgcagcacatcgtgaagcaccggggccactttctgttcgagaacctggacgccagcaaagtgggcgatttcgtggccgtgtttggcgaggtggaaagctacgtgcacgacgagatggaactggacgagtggtactgccacgacatcgatgccctggccaaggtgctgtgcaatgccaatctgggcatcaccgccaagcagaaggccatccagaatctgctgcccgccaagaccaagcaagaaaaggccatcgtgcagctgctgagcggcggaaaggccaagctgtgcgacctgttctgtgacgaggaactggccgaatgcgagaaaaagagcatcagcttccaagaggacaacctcgatgagctggaacccatcctggaagctatcctgcaagagagatacgaggccctgctgcggttcaaggccgtgtatgattggagcctgctggccaagatcctgagactggacgccgacaagaaaagcgagaacgagatgcacctcctgagcgagtgcaaagtgaaggtgtacgaggaacacaagaaagacctggctgtgctgaagtccatgctgaagggcaagcccctgtacaacaagctgttcagacaggacggcgaggacacctacgccaattacgcccagggaatcaaagggatcaaccaggtggacttctgcaagtccctgaagaagcagctggaatctatcggcgagtacaagaaacagatgcagcagctgaccagcttcgaggacgcccagaccgatgtggaaagactgctgtttagagtggccaacggcctggctttccccaagcagaccaccaaggacaacggcatcatcccaatccaggttcacctggccgagctgcagtgtatcctggctcacgccgagaagtacctgcctttcctgaagaacgccgacgccaatggcctgagcgtgcgggaaaagatcacccagatcgtgaagttcagaatcccctactacgtgggacccctggccggcacaagactgtctagagaacagggcagatgctgggtcgagcggagagccgagctgaagaatgagaagatctacccctggaacttcgacaaggtggtggacctggaagcctccgccgagaacttcatcaccaacatgaccgccaagtgcacctacctcgtgggcgaagatgtgctccccaaagagtccctgctgtactccgagttcatggtccgaaacgccctgaacaacctgaccatcgacggcgagagactgcccgtttctctgctgcagaaaatctacaagcagctgttcctggaaaagaccttcaaagtgaccaagaaggccctggaacggttcttcaaacaagagaatgtgtcctaccacgatatcggcggcatcgacgacaagatcaacgcctccatgaaggcctacaacgacttcaagcggatcttcggcgaggcctacatcgaaatgcaccgggatgagatcgagaacatcatccggtggatcaccctgttttgcgacgagaagaagatgctcgagacaaagatccgcaagacgtaccctcagatccccgatgataagatcaaggccattaagaagctgaagtacaaggactggggcagactgagcgccacactgctggattctggcaagatcgcctacgaggatgccagcgtgggcgagagaatcaccatcatctctgccctgcggcacaccaacaagaatttcatggaactgctgagcagcaactgccagtacgacttcatcggcaagattaaggacttcaacggctccaagcagagcgacaatggcaagctgacctacaaggatgtggaagaactgtacgtgtcccctagcgtgaagcggagcatctggcagaccctgaccattctggaagagatcaagaaaatcatgggctgcgagcccaagcgcatcttcatcgagatggccagaagcaaagaggaaagcctgcggaccaacagcaggctgcagagactccaggacctgtacaagaagtgcaaagaagagaacatcgacttcatgcccaaggccgacgagctgaccgacatcagatctcagctccagtgcaagaacgaagaggacctgcggagcgacaagctgtacctgtactacacccagatggggagatgcatgtacaccggcgagaggatcgaactggccagcctgtacgaccagaacaaatacgacgtggacgccatctaccccaggtctaagaccaaggacgacagcctgaacaatcgggtgctcgtgaagaaagagattaacagcgccaagacagacaactaccccatcgacgctgacatccggaagaaaatgcacgccttttggaagatgctgtacgacaagggcttcatcgaccaaaagaagtacgagcggctgaccagaagcacccagctgacagatgaagaactggctggcttcatcaaccggcagctggtggaaaccagacagagcacaaaggccaccgccgacattctgaagtctgcctacgagcacagcgaggtggtgtatgtgaaggccggcaacgtgtccgatttccggcagcagttcgacttcgtgaagtgccgggaagtgaacgacctgcaccacgccaaggacgcctacctgaatatcgtcgtgggcaactgctaccacgtcaagttcaccatcaatccgctgatgttcatccggggcaaccaggacaaccggcggtactctctgaagcccgaggtgttctacgcccacgacattaagcggaacggggagattgcttggctggccggcgataatggcaccatggccacagtgaagagagtgatgcagaaaaacaacgtgctgttcacccggctggccgtggaaggcaaaggcgagctgttcaagcagaaccctctgaaggccaagagcggccagctgcctcttaaagccggcctgagcatcgataagtatggcggctacgactccctgagcaccgcctattttgccctggtggaatccgagggcaagaaaggcgccgtgcagtttacaatcgaggccattcctctggtgtacgccaaacagggcgaagccaccatcaagaaatacctgacagaggtggtgcagctgtgcaagcccgagatcaaagtgatgcggatcaagaagtactccctgctgaagatcaatggcttccccatgcacatctccggcagaaccggaaagcagctgatcttctacgtggccagccagctgtgtatcgacgagaacagcgtggcctatctgaagaaagccctgaagtatgagagcaacctcgaggaaaacgaggccatcctggccgataagaatgccgacgagtccatgaagcagaaagccttcaaccggctcatgttctacaaggacacctggggaatcagcgccgaggctaacctgcagctgtacgatatgctgctggctaagagcgccaacaacctctacaagaacagacccgccagccagaccgccactctgaaagagaagagagagcagttcgccaagctgagcctgagcaagcagatccacgtgatcaaagagatcctgaacctgttcaagtgcgcctccgccagcgccgatttcaagctgcttgataagggcgctgcctgcggcatcctgaaagtgtccaacaacatcaccaagctgaagcagtgcgtgctgatcaatcagagccccaccggcgtgttcgagcaagaggttgacctgatgagactgcctaggggcggcggaggcagctacccctatgatgtacctgattatgcttctggcggacccaagaagaagaggaaagtcggtggttctcctaagaaaaagagaaaggtcggatccggc

SEQ ID NO: 1710 - DNA, 5217 bp, synthetic construct
  source 1..5217: mol_type = other DNA; note mammalian_codon_optimized_tethered_system_MG160-473_MG71-2n _44AA_linker
atgaagaggaccgctgatggttccgaatttgaatctcctaagaagaaacgaaaggttatggaagcctggaaacataagtttgagatcaagaaggacaggtgggtccacgtaccaagcaaggacatggtgatcttcgggaaaaagttgcacaaatttatcagaagaaagtggaatcctcccttttactactatcacctccggaacgggggtcatgttattgccgctaagaatcacaaacataatgactttttcagtgctatagatatatctaacttcttcgaatcaacatcacaaagcagggtgacccgcgagcttaagactatcctcccatataatcaggcccgggaggtcgcaaagatttcaacggtccgagtgcccggaagcaaggataaaaagttctcaatcccttatggctacccacagtcccctatacttgctagtttctgtttgcgaaactcctacgtaggcaatgtgctggacagcatcaataaaggtggacttatcctggtgtctgtctatatggatgatatagtgctgtcttccaaagacctcaatgtgttgaacgatgcatttaatctgatttgcaacgcccttaaaaaaagtcactaccagattaacattgacaaaacccagcccccgagcgaaaagatcagggttttcaacctggagctgtctcatgaccagatcaaggtgtgctccgatcgcctcattcagttcattcaggcctacgcaaaaacacagaacgagtttgaacggaaaggcatcgctgcatatattagaagtgttaaccctcaacaagccaatctgcactttcccaaaggaaaaggtaaaggaatgggagctgggacgctctccactgataaaggggagagtttggggattaaatatgaagaaggacagtcacacagacccactaatccaaatgcgtctcgcatggcgcagaaggtggcatgccagaacaagaagaacgtcgactactacgtcggcctggacatgggagatgcctctgttggatgggccgtgaccgacctgaactacaacatcctgaagttcaacggcaaggccctgtggggcatcagactgttcgattctgccgaaaccgccgctgccagaagaggctttagatctgccaggcggcggatcgacagagtgtcttggagaatctccatgctgcaagagctgttcgccgacgagatcgccaaagtggatgccggcttcttccagcggctgaaggatagcagactgcaggtcgaggacaagcaagagaaaaccgcctacaacctgttcgtgggccagaactacaccgacaaggacttctaccagcagtaccccaccatgtaccacctgagatacgccctggctacacaggccggaccttttgatgtgcggctgctgtatctggccgtgcagcacatcgtgaagcaccggggccactttctgttcgagaacctggacgccagcaaagtgggcgatttcgtggccgtgtttggcgaggtggaaagctacgtgcacgacgagatggaactggacgagtggtactgccacgacatcgatgccctggccaaggtgctgtgcaatgccaatctgggcatcaccgccaagcagaaggccatccagaatctgctgcccgccaagaccaagcaagaaaaggccatcgtgcagctgctgagcggcggaaaggccaagctgtgcgacctgttctgtgacgaggaactggccgaatgcgagaaaaagagcatcagcttccaagaggacaacctcgatgagctggaacccatcctggaagctatcctgcaagagagatacgaggccctgctgcggttcaaggccgtgtatgattggagcctgctggccaagatcctgagactggacgccgacaagaaaagcgagaacgagatgcacctcctgagcgagtgcaaagtgaaggtgtacgaggaacacaagaaagacctggctgtgctgaagtccatgctgaagggcaagcccctgtacaacaagctgttcagacaggacggcgaggacacctacgccaattacgcccagggaatcaaagggatcaaccaggtggacttctgcaagtccctgaagaagcagctggaatctatcggcgagtacaagaaacagatgcagcagctgaccagcttcgaggacgcccagaccgatgtggaaagactgctgtttagagtggccaacggcctggctttccccaagcagaccaccaaggacaacggcatcatcccaatccaggttcacctggccgagctgcagtgtatcctggctcacgccgagaagtacctgcctttcctgaagaacgccgacgccaatggcctgagcgtgcgggaaaagatcacccagatcgtgaagttcagaatcccctactacgtgggacccctggccggcacaagactgtctagagaacagggcagatgctgggtcgagcggagagccgagctgaagaatgagaagatctacccctggaacttcgacaaggtggtggacctggaagcctccgccgagaacttcatcaccaacatgaccgccaagtgcacctacctcgtgggcgaagatgtgctccccaaagagtccctgctgtactccgagttcatggtccgaaacgccctgaacaacctgaccatcgacggcgagagactgcccgtttctctgctgcagaaaatctacaagcagctgttcctggaaaagaccttcaaagtgaccaagaaggccctggaacggttcttcaaacaagagaatgtgtcctaccacgatatcggcggcatcgacgacaagatcaacgcctccatgaaggcctacaacgacttcaagcggatcttcggcgaggcctacatcgaaatgcaccgggatgagatcgagaacatcatccggtggatcaccctgttttgcgacgagaagaagatgctcgagacaaagatccgcaagacgtaccctcagatccccgatgataagatcaaggccattaagaagctgaagtacaaggactggggcagactgagcgccacactgctggattctggcaagatcgcctacgaggatgccagcgtgggcgagagaatcaccatcatctctgccctgcggcacaccaacaagaatttcatggaactgctgagcagcaactgccagtacgacttcatcggcaagattaaggacttcaacggctccaagcagagcgacaatggcaagctgacctacaaggatgtggaagaactgtacgtgtcccctagcgtgaagcggagcatctggcagaccctgaccattctggaagagatcaagaaaatcatgggctgcgagcccaagcgcatcttcatcgagatggccagaagcaaagaggaaagcctgcggaccaacagcaggctgcagagactccaggacctgtacaagaagtgcaaagaagagaacatcgacttcatgcccaaggccgacgagctgaccgacatcagatctcagctccagtgcaagaacgaagaggacctgcggagcgacaagctgtacctgtactacacccagatggggagatgcatgtacaccggcgagaggatcgaactggccagcctgtacgaccagaacaaatacgacgtggacgccatctaccccaggtctaagaccaaggacgacagcctgaacaatcgggtgctcgtgaagaaagagattaacagcgccaagacagacaactaccccatcgacgctgacatccggaagaaaatgcacgccttttggaagatgctgtacgacaagggcttcatcgaccaaaagaagtacgagcggctgaccagaagcacccagctgacagatgaagaactggctggcttcatcaaccggcagctggtggaaaccagacagagcacaaaggccaccgccgacattctgaagtctgcctacgagcacagcgaggtggtgtatgtgaaggccggcaacgtgtccgatttccggcagcagttcgacttcgtgaagtgccgggaagtgaacgacctgcaccacgccaaggacgcctacctgaatatcgtcgtgggcaactgctaccacgtcaagttcaccatcaatccgctgatgttcatccggggcaaccaggacaaccggcggtactctctgaagcccgaggtgttctacgcccacgacattaagcggaacggggagattgcttggctggccggcgataatggcaccatggccacagtgaagagagtgatgcagaaaaacaacgtgctgttcacccggctggccgtggaaggcaaaggcgagctgttcaagcagaaccctctgaaggccaagagcggccagctgcctcttaaagccggcctgagcatcgataagtatggcggctacgactccctgagcaccgcctattttgccctggtggaatccgagggcaagaaaggcgccgtgcagtttacaatcgaggccattcctctggtgtacgccaaacagggcgaagccaccatcaagaaatacctgacagaggtggtgcagctgtgcaagcccgagatcaaagtgatgcggatcaagaagtactccctgctgaagatcaatggcttccccatgcacatctccggcagaaccggaaagcagctgatcttctacgtggccagccagctgtgtatcgacgagaacagcgtggcctatctgaagaaagccctgaagtatgagagcaacctcgaggaaaacgaggccatcctggccgataagaatgccgacgagtccatgaagcagaaagccttcaaccggctcatgttctacaaggacacctggggaatcagcgccgaggctaacctgcagctgtacgatatgctgctggctaagagcgccaacaacctctacaagaacagacccgccagccagaccgccactctgaaagagaagagagagcagttcgccaagctgagcctgagcaagcagatccacgtgatcaaagagatcctgaacctgttcaagtgcgcctccgccagcgccgatttcaagctgcttgataagggcgctgcctgcggcatcctgaaagtgtccaacaacatcaccaagctgaagcagtgcgtgctgatcaatcagagccccaccggcgtgttcgagcaagaggttgacctgatgagactgcctaggggcggcggaggcagctacccctatgatgtacctgattatgcttctggcggacccaagaagaagaggaaagtcggtggttctcctaagaaaaagagaaaggtcggatccggc

SEQ ID NO: 1711 - DNA, 5259 bp, synthetic construct
  source 1..5259: mol_type = other DNA; note mammalian_codon_optimized_tethered_system_MG160-473_MG71-2n _58AA_linker
atgaagaggaccgctgatggttccgaatttgaatctcctaagaagaaacgaaaggttatggaagcctggaaacataagtttgagatcaagaaggacaggtgggtccacgtaccaagcaaggacatggtgatcttcgggaaaaagttgcacaaatttatcagaagaaagtggaatcctcccttttactactatcacctccggaacgggggtcatgttattgccgctaagaatcacaaacataatgactttttcagtgctatagatatatctaacttcttcgaatcaacatcacaaagcagggtgacccgcgagcttaagactatcctcccatataatcaggcccgggaggtcgcaaagatttcaacggtccgagtgcccggaagcaaggataaaaagttctcaatcccttatggctacccacagtcccctatacttgctagtttctgtttgcgaaactcctacgtaggcaatgtgctggacagcatcaataaaggtggacttatcctggtgtctgtctatatggatgatatagtgctgtcttccaaagacctcaatgtgttgaacgatgcatttaatctgatttgcaacgcccttaaaaaaagtcactaccagattaacattgacaaaacccagcccccgagcgaaaagatcagggttttcaacctggagctgtctcatgaccagatcaaggtgtgctccgatcgcctcattcagttcattcaggcctacgcaaaaacacagaacgagtttgaacggaaaggcatcgctgcatatattagaagtgttaaccctcaacaagccaatctgcactttccctgttatggtaagaaatatggacccaaaggaaaaggtaaaggtatgggtgccggcacgttatctacggataaaggagagagtctcggtatcaaatatgaagaagggcaaagccacaggcccaccaatcctaatgcatcccggatggcccagaaagtcggcggcagcgacggatgcgcatgccagaacaagaagaacgtcgactactacgtcggcctggacatgggagatgcctctgttggatgggccgtgaccgacctgaactacaacatcctgaagttcaacggcaaggccctgtggggcatcagactgttcgattctgccgaaaccgccgctgccagaagaggctttagatctgccaggcggcggatcgacagagtgtcttggagaatctccatgctgcaagagctgttcgccgacgagatcgccaaagtggatgccggcttcttccagcggctgaaggatagcagactgcaggtcgaggacaagcaagagaaaaccgcctacaacctgttcgtgggccagaactacaccgacaaggacttctaccagcagtaccccaccatgtaccacctgagatacgccctggctacacaggccggaccttttgatgtgcggctgctgtatctggccgtgcagcacatcgtgaagcaccggggccactttctgttcgagaacctggacgccagcaaagtgggcgatttcgtggccgtgtttggcgaggtggaaagctacgtgcacgacgagatggaactggacgagtggtactgccacgacatcgatgccctggccaaggtgctgtgcaatgccaatctgggcatcaccgccaagcagaaggccatccagaatctgctgcccgccaagaccaagcaagaaaaggccatcgtgcagctgctgagcggcggaaaggccaagctgtgcgacctgttctgtgacgaggaactggccgaatgcgagaaaaagagcatcagcttccaagaggacaacctcgatgagctggaacccatcctggaagctatcctgcaagagagatacgaggccctgctgcggttcaaggccgtgtatgattggagcctgctggccaagatcctgagactggacgccgacaagaaaagcgagaacgagatgcacctcctgagcgagtgcaaagtgaaggtgtacgaggaacacaagaaagacctggctgtgctgaagtccatgctgaagggcaagcccctgtacaacaagctgttcagacaggacggcgaggacacctacgccaattacgcccagggaatcaaagggatcaaccaggtggacttctgcaagtccctgaagaagcagctggaatctatcggcgagtacaagaaacagatgcagcagctgaccagcttcgaggacgcccagaccgatgtggaaagactgctgtttagagtggccaacggcctggctttccccaagcagaccaccaaggacaacggcatcatcccaatccaggttcacctggccgagctgcagtgtatcctggctcacgccgagaagtacctgcctttcctgaagaacgccgacgccaatggcctgagcgtgcgggaaaagatcacccagatcgtgaagttcagaatcccctactacgtgggacccctggccggcacaagactgtctagagaacagggcagatgctgggtcgagcggagagccgagctgaagaatgagaagatctacccctggaacttcgacaaggtggtggacctggaagcctccgccgagaacttcatcaccaacatgaccgccaagtgcacctacctcgtgggcgaagatgtgctccccaaagagtccctgctgtactccgagttcatggtccgaaacgccctgaacaacctgaccatcgacggcgagagactgcccgtttctctgctgcagaaaatctacaagcagctgttcctggaaaagaccttcaaagtgaccaagaaggccctggaacggttcttcaaacaagagaatgtgtcctaccacgatatcggcggcatcgacgacaagatcaacgcctccatgaaggcctacaacgacttcaagcggatcttcggcgaggcctacatcgaaatgcaccgggatgagatcgagaacatcatccggtggatcaccctgttttgcgacgagaagaagatgctcgagacaaagatccgcaagacgtaccctcagatccccgatgataagatcaaggccattaagaagctgaagtacaaggactggggcagactgagcgccacactgctggattctggcaagatcgcctacgaggatgccagcgtgggcgagagaatcaccatcatctctgccctgcggcacaccaacaagaatttcatggaactgctgagcagcaactgccagtacgacttcatcggcaagattaaggacttcaacggctccaagcagagcgacaatggcaagctgacctacaaggatgtggaagaactgtacgtgtcccctagcgtgaagcggagcatctggcagaccctgaccattctggaagagatcaagaaaatcatgggctgcgagcccaagcgcatcttcatcgagatggccagaagcaaagaggaaagcctgcggaccaacagcaggctgcagagactccaggacctgtacaagaagtgcaaagaagagaacatcgacttcatgcccaaggccgacgagctgaccgacatcagatctcagctccagtgcaagaacgaagaggacctgcggagcgacaagctgtacctgtactacacccagatggggagatgcatgtacaccggcgagaggatcgaactggccagcctgtacgaccagaacaaatacgacgtggacgccatctaccccaggtctaagaccaaggacgacagcctgaacaatcgggtgctcgtgaagaaagagattaacagcgccaagacagacaactaccccatcgacgctgacatccggaagaaaatgcacgccttttggaagatgctgtacgacaagggcttcatcgaccaaaagaagtacgagcggctgaccagaagcacccagctgacagatgaagaactggctggcttcatcaaccggcagctggtggaaaccagacagagcacaaaggccaccgccgacattctgaagtctgcctacgagcacagcgaggtggtgtatgtgaaggccggcaacgtgtccgatttccggcagcagttcgacttcgtgaagtgccgggaagtgaacgacctgcaccacgccaaggacgcctacctgaatatcgtcgtgggcaactgctaccacgtcaagttcaccatcaatccgctgatgttcatccggggcaaccaggacaaccggcggtactctctgaagcccgaggtgttctacgcccacgacattaagcggaacggggagattgcttggctggccggcgataatggcaccatggccacagtgaagagagtgatgcagaaaaacaacgtgctgttcacccggctggccgtggaaggcaaaggcgagctgttcaagcagaaccctctgaaggccaagagcggccagctgcctcttaaagccggcctgagcatcgataagtatggcggctacgactccctgagcaccgcctattttgccctggtggaatccgagggcaagaaaggcgccgtgcagtttacaatcgaggccattcctctggtgtacgccaaacagggcgaagccaccatcaagaaatacctgacagaggtggtgcagctgtgcaagcccgagatcaaagtgatgcggatcaagaagtactccctgctgaagatcaatggcttccccatgcacatctccggcagaaccggaaagcagctgatcttctacgtggccagccagctgtgtatcgacgagaacagcgtggcctatctgaagaaagccctgaagtatgagagcaacctcgaggaaaacgaggccatcctggccgataagaatgccgacgagtccatgaagcagaaagccttcaaccggctcatgttctacaaggacacctggggaatcagcgccgaggctaacctgcagctgtacgatatgctgctggctaagagcgccaacaacctctacaagaacagacccgccagccagaccgccactctgaaagagaagagagagcagttcgccaagctgagcctgagcaagcagatccacgtgatcaaagagatcctgaacctgttcaagtgcgcctccgccagcgccgatttcaagctgcttgataagggcgctgcctgcggcatcctgaaagtgtccaacaacatcaccaagctgaagcagtgcgtgctgatcaatcagagccccaccggcgtgttcgagcaagaggttgacctgatgagactgcctaggggcggcggaggcagctacccctatgatgtacctgattatgcttctggcggacccaagaagaagaggaaagtcggtggttctcctaagaaaaagagaaaggtcggatccggc

SEQ ID NO: 1712 - DNA, 1416 bp, synthetic construct; identical to SEQ ID NO: 1303
  source 1..1416: mol_type = other DNA; note MG151-98-H171N-166AA_cloned_into_tethered_or_untethered_pla smid

SEQ ID NO: 1713 - DNA, 5763 bp, synthetic construct
  source 1..5763: mol_type = other DNA; note mammalian_codon_optimized_tethered_system_MG151-98-H171N-16 6AA_MG71-2n_7AA_linker
atgaagaggaccgctgatggttccgaatttgaatctcctaagaagaaacgaaaggttgacaatattaagcaattatctgtgttgcctggactgtccgaggacccttccgcagtcggcttgcttcaggtgaaagagcagcaggtgcctattgcgactaaggcagttcatcgcagacagtataggacaaatcgggactcattattaccaattcacaaattgatccggcagctggaaagtcagggcgtcatcagcagaacccattcccccttcaacagccccatttggcctgtgaggaaggcctcaggcgaatggcgactgaccgtggactacagggggttgaatgaagtcacccctccgttaagtgcagccgtgccggatatgctggaattgcagtatgagctggaatccaaagcagctaaatggtatgctactatcgacatagccaatgcattcttttccatccctcttgccagggagtgtaggccccagttcgcctttacatggaggggcatccaatatacttggaatcgcctgcctcagggttggaagcatagtcccacaatctgcaacggcctcatccaaactgtgctcgagcaggggagcgcacctgagcacctgcagtacattgacgatattgtggtgtggggcgacaccgccgaggacgtgttcaagaaaggagagcaaattatacagatcttgctgcaggccggcttcgcaatcaaacgaagcaaggtgaaggggcccgctcaggagatccagttcttaggcattaaatggcaggacggccgccgccacatcccagcagatgtcatcgataagatcacagcaatgtcaccccccattaacaaaaaagaaacgcagtcttttctgggcgtagttggattttggaggatgcacgtcccaaactactcccttattgtgtcaccattgtatcaggtgactcgtaaaaaaaatgacttcacctggggacctgaacagcagcaggcatttgagcagattaaacatgaaatcgcccgggccgtagcactgggaccggtaaggacaggccaggatgtgaaaaacatcttatacacagctgctggcgaaaaaggtcctacatggagcctgtggcagcgtacttccggtgagactagggggcgccctctcgggttctggagccgggcttaccgggggtccgaggaatgctataccccaactgaaaaagaaatactcgcagcatatgaaggtgtgcgagcggcaagtgaagtggttggaactgagacccagctcttgctggcaccccgcctgccagtgctcaactggatgtttaaggggaaaataccctccacccaccacgcgaccgacgcaacctggtctaagtggattgcactcattacacaacgcgcccggatgggcaacttctccaggccgggcatattggaggtcataatggactggccggagggaaagaaattcgagacctcccctggcgaacctgcccccgccccagccccagcatgccagaacaagaagaacgtcgactactacgtcggcctggacatgggagatgcctctgttggatgggccgtgaccgacctgaactacaacatcctgaagttcaacggcaaggccctgtggggcatcagactgttcgattctgccgaaaccgccgctgccagaagaggctttagatctgccaggcggcggatcgacagagtgtcttggagaatctccatgctgcaagagctgttcgccgacgagatcgccaaagtggatgccggcttcttccagcggctgaaggatagcagactgcaggtcgaggacaagcaagagaaaaccgcctacaacctgttcgtgggccagaactacaccgacaaggacttctaccagcagtaccccaccatgtaccacctgagatacgccctggctacacaggccggaccttttgatgtgcggctgctgtatctggccgtgcagcacatcgtgaagcaccggggccactttctgttcgagaacctggacgccagcaaagtgggcgatttcgtggccgtgtttggcgaggtggaaagctacgtgcacgacgagatggaactggacgagtggtactgccacgacatcgatgccctggccaaggtgctgtgcaatgccaatctgggcatcaccgccaagcagaaggccatccagaatctgctgcccgccaagaccaagcaagaaaaggccatcgtgcagctgctgagcggcggaaaggccaagctgtgcgacctgttctgtgacgaggaactggccgaatgcgagaaaaagagcatcagcttccaagaggacaacctcgatgagctggaacccatcctggaagctatcctgcaagagagatacgaggccctgctgcggttcaaggccgtgtatgattggagcctgctggccaagatcctgagactggacgccgacaagaaaagcgagaacgagatgcacctcctgagcgagtgcaaagtgaaggtgtacgaggaacacaagaaagacctggctgtgctgaagtccatgctgaagggcaagcccctgtacaacaagctgttcagacaggacggcgaggacacctacgccaattacgcccagggaatcaaagggatcaaccaggtggacttctgcaagtccctgaagaagcagctggaatctatcggcgagtacaagaaacagatgcagcagctgaccagcttcgaggacgcccagaccgatgtggaaagactgctgtttagagtggccaacggcctggctttccccaagcagaccaccaaggacaacggcatcatcccaatccaggttcacctggccgagctgcagtgtatcctggctcacgccgagaagtacctgcctttcctgaagaacgccgacgccaatggcctgagcgtgcgggaaaagatcacccagatcgtgaagttcagaatcccctactacgtgggacccctggccggcacaagactgtctagagaacagggcagatgctgggtcgagcggagagccgagctgaagaatgagaagatctacccctggaacttcgacaaggtggtggacctggaagcctccgccgagaacttcatcaccaacatgaccgccaagtgcacctacctcgtgggcgaagatgtgctccccaaagagtccctgctgtactccgagttcatggtccgaaacgccctgaacaacctgaccatcgacggcgagagactgcccgtttctctgctgcagaaaatctacaagcagctgttcctggaaaagaccttcaaagtgaccaagaaggccctggaacggttcttcaaacaagagaatgtgtcctaccacgatatcggcggcatcgacgacaagatcaacgcctccatgaaggcctacaacgacttcaagcggatcttcggcgaggcctacatcgaaatgcaccgggatgagatcgagaacatcatccggtggatcaccctgttttgcgacgagaagaagatgctcgagacaaagatccgcaagacgtaccctcagatccccgatgataagatcaaggccattaagaagctgaagtacaaggactggggcagactgagcgccacactgctggattctggcaagatcgcctacgaggatgccagcgtgggcgagagaatcaccatcatctctgccctgcggcacaccaacaagaatttcatggaactgctgagcagcaactgccagtacgacttcatcggcaagattaaggacttcaacggctccaagcagagcgacaatggcaagctgacctacaaggatgtggaagaactgtacgtgtcccctagcgtgaagcggagcatctggcagaccctgaccattctggaagagatcaagaaaatcatgggctgcgagcccaagcgcatcttcatcgagatggccagaagcaaagaggaaagcctgcggaccaacagcaggctgcagagactccaggacctgtacaagaagtgcaaagaagagaacatcgacttcatgcccaaggccgacgagctgaccgacatcagatctcagctccagtgcaagaacgaagaggacctgcggagcgacaagctgtacctgtactacacccagatggggagatgcatgtacaccggcgagaggatcgaactggccagcctgtacgaccagaacaaatacgacgtggacgccatctaccccaggtctaagaccaaggacgacagcctgaacaatcgggtgctcgtgaagaaagagattaacagcgccaagacagacaactaccccatcgacgctgacatccggaagaaaatgcacgccttttggaagatgctgtacgacaagggcttcatcgaccaaaagaagtacgagcggctgaccagaagcacccagctgacagatgaagaactggctggcttcatcaaccggcagctggtggaaaccagacagagcacaaaggccaccgccgacattctgaagtctgcctacgagcacagcgaggtggtgtatgtgaaggccggcaacgtgtccgatttccggcagcagttcgacttcgtgaagtgccgggaagtgaacgacctgcaccacgccaaggacgcctacctgaatatcgtcgtgggcaactgctaccacgtcaagttcaccatcaatccgctgatgttcatccggggcaaccaggacaaccggcggtactctctgaagcccgaggtgttctacgcccacgacattaagcggaacggggagattgcttggctggccggcgataatggcaccatggccacagtgaagagagtgatgcagaaaaacaacgtgctgttcacccggctggccgtggaaggcaaaggcgagctgttcaagcagaaccctctgaaggccaagagcggccagctgcctcttaaagccggcctgagcatcgataagtatggcggctacgactccctgagcaccgcctattttgccctggtggaatccgagggcaagaaaggcgccgtgcagtttacaatcgaggccattcctctggtgtacgccaaacagggcgaagccaccatcaagaaatacctgacagaggtggtgcagctgtgcaagcccgagatcaaagtgatgcggatcaagaagtactccctgctgaagatcaatggcttccccatgcacatctccggcagaaccggaaagcagctgatcttctacgtggccagccagctgtgtatcgacgagaacagcgtggcctatctgaagaaagccctgaagtatgagagcaacctcgaggaaaacgaggccatcctggccgataagaatgccgacgagtccatgaagcagaaagccttcaaccggctcatgttctacaaggacacctggggaatcagcgccgaggctaacctgcagctgtacgatatgctgctggctaagagcgccaacaacctctacaagaacagacccgccagccagaccgccactctgaaagagaagagagagcagttcgccaagctgagcctgagcaagcagatccacgtgatcaaagagatcctgaacctgttcaagtgcgcctccgccagcgccgatttcaagctgcttgataagggcgctgcctgcggcatcctgaaagtgtccaacaacatcaccaagctgaagcagtgcgtgctgatcaatcagagccccaccggcgtgttcgagcaagaggttgacctgatgagactgcctaggggcggcggaggcagctacccctatgatgtacctgattatgcttctggcggacccaagaagaagaggaaagtcggtggttctcctaagaaaaagagaaaggtcggatccggc

SEQ ID NO: 1714 - DNA, 5784 bp, synthetic construct
  source 1..5784: mol_type = other DNA; note mammalian_codon_optimized_tethered_system_MG151-98-H171N-16 6AA_MG71-2n_14AA_linker
atgaagaggaccgctgatggttccgaatttgaatctcctaagaagaaacgaaaggttgacaatattaagcaattatctgtgttgcctggactgtccgaggacccttccgcagtcggcttgcttcaggtgaaagagcagcaggtgcctattgcgactaaggcagttcatcgcagacagtataggacaaatcgggactcattattaccaattcacaaattgatccggcagctggaaagtcagggcgtcatcagcagaacccattcccccttcaacagccccatttggcctgtgaggaaggcctcaggcgaatggcgactgaccgtggactacagggggttgaatgaagtcacccctccgttaagtgcagccgtgccggatatgctggaattgcagtatgagctggaatccaaagcagctaaatggtatgctactatcgacatagccaatgcattcttttccatccctcttgccagggagtgtaggccccagttcgcctttacatggaggggcatccaatatacttggaatcgcctgcctcagggttggaagcatagtcccacaatctgcaacggcctcatccaaactgtgctcgagcaggggagcgcacctgagcacctgcagtacattgacgatattgtggtgtggggcgacaccgccgaggacgtgttcaagaaaggagagcaaattatacagatcttgctgcaggccggcttcgcaatcaaacgaagcaaggtgaaggggcccgctcaggagatccagttcttaggcattaaatggcaggacggccgccgccacatcccagcagatgtcatcgataagatcacagcaatgtcaccccccattaacaaaaaagaaacgcagtcttttctgggcgtagttggattttggaggatgcacgtcccaaactactcccttattgtgtcaccattgtatcaggtgactcgtaaaaaaaatgacttcacctggggacctgaacagcagcaggcatttgagcagattaaacatgaaatcgcccgggccgtagcactgggaccggtaaggacaggccaggatgtgaaaaacatcttatacacagctgctggcgaaaaaggtcctacatggagcctgtggcagcgtacttccggtgagactagggggcgccctctcgggttctggagccgggcttaccgggggtccgaggaatgctataccccaactgaaaaagaaatactcgcagcatatgaaggtgtgcgagcggcaagtgaagtggttggaactgagacccagctcttgctggcaccccgcctgccagtgctcaactggatgtttaaggggaaaataccctccacccaccacgcgaccgacgcaacctggtctaagtggattgcactcattacacaacgcgcccggatgggcaacttctccaggccgggcatattggaggtcataatggactggccggagggaaagaaattcgagacctcccctggcgaaaaattaggaggaggtgcccctgctgtcggaggaggtccaaaggcatgccagaacaagaagaacgtcgactactacgtcggcctggacatgggagatgcctctgttggatgggccgtgaccgacctgaactacaacatcctgaagttcaacggcaaggccctgtggggcatcagactgttcgattctgccgaaaccgccgctgccagaagaggctttagatctgccaggcggcggatcgacagagtgtcttggagaatctccatgctgcaagagctgttcgccgacgagatcgccaaagtggatgccggcttcttccagcggctgaaggatagcagactgcaggtcgaggacaagcaagagaaaaccgcctacaacctgttcgtgggccagaactacaccgacaaggacttctaccagcagtaccccaccatgtaccacctgagatacgccctggctacacaggccggaccttttgatgtgcggctgctgtatctggccgtgcagcacatcgtgaagcaccggggccactttctgttcgagaacctggacgccagcaaagtgggcgatttcgtggccgtgtttggcgaggtggaaagctacgtgcacgacgagatggaactggacgagtggtactgccacgacatcgatgccctggccaaggtgctgtgcaatgccaatctgggcatcaccgccaagcagaaggccatccagaatctgctgcccgccaagaccaagcaagaaaaggccatcgtgcagctgctgagcggcggaaaggccaagctgtgcgacctgttctgtgacgaggaactggccgaatgcgagaaaaagagcatcagcttccaagaggacaacctcgatgagctggaacccatcctggaagctatcctgcaagagagatacgaggccctgctgcggttcaaggccgtgtatgattggagcctgctggccaagatcctgagactggacgccgacaagaaaagcgagaacgagatgcacctcctgagcgagtgcaaagtgaaggtgtacgaggaacacaagaaagacctggctgtgctgaagtccatgctgaagggcaagcccctgtacaacaagctgttcagacaggacggcgaggacacctacgccaattacgcccagggaatcaaagggatcaaccaggtggacttctgcaagtccctgaagaagcagctggaatctatcggcgagtacaagaaacagatgcagcagctgaccagcttcgaggacgcccagaccgatgtggaaagactgctgtttagagtggccaacggcctggctttccccaagcagaccaccaaggacaacggcatcatcccaatccaggttcacctggccgagctgcagtgtatcctggctcacgccgagaagtacctgcctttcctgaagaacgccgacgccaatggcctgagcgtgcgggaaaagatcacccagatcgtgaagttcagaatcccctactacgtgggacccctggccggcacaagactgtctagagaacagggcagatgctgggtcgagcggagagccgagctgaagaatgagaagatctacccctggaacttcgacaaggtggtggacctggaagcctccgccgagaacttcatcaccaacatgaccgccaagtgcacctacctcgtgggcgaagatgtgctccccaaagagtccctgctgtactccgagttcatggtccgaaacgccctgaacaacctgaccatcgacggcgagagactgcccgtttctctgctgcagaaaatctacaagcagctgttcctggaaaagaccttcaaagtgaccaagaaggccctggaacggttcttcaaacaagagaatgtgtcctaccacgatatcggcggcatcgacgacaagatcaacgcctccatgaaggcctacaacgacttcaagcggatcttcggcgaggcctacatcgaaatgcaccgggatgagatcgagaacatcatccggtggatcaccctgttttgcgacgagaagaagatgctcgagacaaagatccgcaagacgtaccctcagatccccgatgataagatcaaggccattaagaagctgaagtacaaggactggggcagactgagcgccacactgctggattctggcaagatcgcctacgaggatgccagcgtgggcgagagaatcaccatcatctctgccctgcggcacaccaacaagaatttcatggaactgctgagcagcaactgccagtacgacttcatcggcaagattaaggacttcaacggctccaagcagagcgacaatggcaagctgacctacaaggatgtggaagaactgtacgtgtcccctagcgtgaagcggagcatctggcagaccctgaccattctggaagagatcaagaaaatcatgggctgcgagcccaagcgcatcttcatcgagatggccagaagcaaagaggaaagcctgcggaccaacagcaggctgcagagactccaggacctgtacaagaagtgcaaagaagagaacatcgacttcatgcccaaggccgacgagctgaccgacatcagatctcagctccagtgcaagaacgaagaggacctgcggagcgacaagctgtacctgtactacacccagatggggagatgcatgtacaccggcgagaggatcgaactggccagcctgtacgaccagaacaaatacgacgtggacgccatctaccccaggtctaagaccaaggacgacagcctgaacaatcgggtgctcgtgaagaaagagattaacagcgccaagacagacaactaccccatcgacgctgacatccggaagaaaatgcacgccttttggaagatgctgtacgacaagggcttcatcgaccaaaagaagtacgagcggctgaccagaagcacccagctgacagatgaagaactggctggcttcatcaaccggcagctggtggaaaccagacagagcacaaaggccaccgccgacattctgaagtctgcctacgagcacagcgaggtggtgtatgtgaaggccggcaacgtgtccgatttccggcagcagttcgacttcgtgaagtgccgggaagtgaacgacctgcaccacgccaaggacgcctacctgaatatcgtcgtgggcaactgctaccacgtcaagttcaccatcaatccgctgatgttcatccggggcaaccaggacaaccggcggtactctctgaagcccgaggtgttctacgcccacgacattaagcggaacggggagattgcttggctggccggcgataatggcaccatggccacagtgaagagagtgatgcagaaaaacaacgtgctgttcacccggctggccgtggaaggcaaaggcgagctgttcaagcagaaccctctgaaggccaagagcggccagctgcctcttaaagccggcctgagcatcgataagtatggcggctacgactccctgagcaccgcctattttgccctggtggaatccgagggcaagaaaggcgccgtgcagtttacaatcgaggccattcctctggtgtacgccaaacagggcgaagccaccatcaagaaatacctgacagaggtggtgcagctgtgcaagcccgagatcaaagtgatgcggatcaagaagtactccctgctgaagatcaatggcttccccatgcacatctccggcagaaccggaaagcagctgatcttctacgtggccagccagctgtgtatcgacgagaacagcgtggcctatctgaagaaagccctgaagtatgagagcaacctcgaggaaaacgaggccatcctggccgataagaatgccgacgagtccatgaagcagaaagccttcaaccggctcatgttctacaaggacacctggggaatcagcgccgaggctaacctgcagctgtacgatatgctgctggctaagagcgccaacaacctctacaagaacagacccgccagccagaccgccactctgaaagagaagagagagcagttcgccaagctgagcctgagcaagcagatccacgtgatcaaagagatcctgaacctgttcaagtgcgcctccgccagcgccgatttcaagctgcttgataagggcgctgcctgcggcatcctgaaagtgtccaacaacatcaccaagctgaagcagtgcgtgctgatcaatcagagccccaccggcgtgttcgagcaagaggttgacctgatgagactgcctaggggcggcggaggcagctacccctatgatgtacctgattatgcttctggcggacccaagaagaagaggaaagtcggtggttctcctaagaaaaagagaaaggtcggatccggc

SEQ ID NO: 1715 - DNA, 5787 bp, synthetic construct
  source 1..5787: mol_type = other DNA; note mammalian_codon_optimized_tethered_system_MG151-98-H171N-16 6AA_MG71-2n_15AA_linker
atgaagaggaccgctgatggttccgaatttgaatctcctaagaagaaacgaaaggttgacaatattaagcaattatctgtgttgcctggactgtccgaggacccttccgcagtcggcttgcttcaggtgaaagagcagcaggtgcctattgcgactaaggcagttcatcgcagacagtataggacaaatcgggactcattattaccaattcacaaattgatccggcagctggaaagtcagggcgtcatcagcagaacccattcccccttcaacagccccatttggcctgtgaggaaggcctcaggcgaatggcgactgaccgtggactacagggggttgaatgaagtcacccctccgttaagtgcagccgtgccggatatgctggaattgcagtatgagctggaatccaaagcagctaaatggtatgctactatcgacatagccaatgcattcttttccatccctcttgccagggagtgtaggccccagttcgcctttacatggaggggcatccaatatacttggaatcgcctgcctcagggttggaagcatagtcccacaatctgcaacggcctcatccaaactgtgctcgagcaggggagcgcacctgagcacctgcagtacattgacgatattgtggtgtggggcgacaccgccgaggacgtgttcaagaaaggagagcaaattatacagatcttgctgcaggccggcttcgcaatcaaacgaagcaaggtgaaggggcccgctcaggagatccagttcttaggcattaaatggcaggacggccgccgccacatcccagcagatgtcatcgataagatcacagcaatgtcaccccccattaacaaaaaagaaacgcagtcttttctgggcgtagttggattttggaggatgcacgtcccaaactactcccttattgtgtcaccattgtatcaggtgactcgtaaaaaaaatgacttcacctggggacctgaacagcagcaggcatttgagcagattaaacatgaaatcgcccgggccgtagcactgggaccggtaaggacaggccaggatgtgaaaaacatcttatacacagctgctggcgaaaaaggtcctacatggagcctgtggcagcgtacttccggtgagactagggggcgccctctcgggttctggagccgggcttaccgggggtccgaggaatgctataccccaactgaaaaagaaatactcgcagcatatgaaggtgtgcgagcggcaagtgaagtggttggaactgagacccagctcttgctggcaccccgcctgccagtgctcaactggatgtttaaggggaaaataccctccacccaccacgcgaccgacgcaacctggtctaagtggattgcactcattacacaacgcgcccggatgggcaacttctccaggccgggcatattggaggtcataatggactggccggagggaaagaaattcgagacctcccctggcgaaggcggaggaggaagcggtggaggaggctctggcggcggtggctcagcatgccagaacaagaagaacgtcgactactacgtcggcctggacatgggagatgcctctgttggatgggccgtgaccgacctgaactacaacatcctgaagttcaacggcaaggccctgtggggcatcagactgttcgattctgccgaaaccgccgctgccagaagaggctttagatctgccaggcggcggatcgacagagtgtcttggagaatctccatgctgcaagagctgttcgccgacgagatcgccaaagtggatgccggcttcttccagcggctgaaggatagcagactgcaggtcgaggacaagcaagagaaaaccgcctacaacctgttcgtgggccagaactacaccgacaaggacttctaccagcagtaccccaccatgtaccacctgagatacgccctggctacacaggccggaccttttgatgtgcggctgctgtatctggccgtgcagcacatcgtgaagcaccggggccactttctgttcgagaacctggacgccagcaaagtgggcgatttcgtggccgtgtttggcgaggtggaaagctacgtgcacgacgagatggaactggacgagtggtactgccacgacatcgatgccctggccaaggtgctgtgcaatgccaatctgggcatcaccgccaagcagaaggccatccagaatctgctgcccgccaagaccaagcaagaaaaggccatcgtgcagctgctgagcggcggaaaggccaagctgtgcgacctgttctgtgacgaggaactggccgaatgcgagaaaaagagcatcagcttccaagaggacaacctcgatgagctggaacccatcctggaagctatcctgcaagagagatacgaggccctgctgcggttcaaggccgtgtatgattggagcctgctggccaagatcctgagactggacgccgacaagaaaagcgagaacgagatgcacctcctgagcgagtgcaaagtgaaggtgtacgaggaacacaagaaagacctggctgtgctgaagtccatgctgaagggcaagcccctgtacaacaagctgttcagacaggacggcgaggacacctacgccaattacgcccagggaatcaaagggatcaaccaggtggacttctgcaagtccctgaagaagcagctggaatctatcggcgagtacaagaaacagatgcagcagctgaccagcttcgaggacgcccagaccgatgtggaaagactgctgtttagagtggccaacggcctggctttccccaagcagaccaccaaggacaacggcatcatcccaatccaggttcacctggccgagctgcagtgtatcctggctcacgccgagaagtacctgcctttcctgaagaacgccgacgccaatggcctgagcgtgcgggaaaagatcacccagatcgtgaagttcagaatcccctactacgtgggacccctggccggcacaagactgtctagagaacagggcagatgctgggtcgagcggagagccgagctgaagaatgagaagatctacccctggaacttcgacaaggtggtggacctggaagcctccgccgagaacttcatcaccaacatgaccgccaagtgcacctacctcgtgggcgaagatgtgctccccaaagagtccctgctgtactccgagttcatggtccgaaacgccctgaacaacctgaccatcgacggcgagagactgcccgtttctctgctgcagaaaatctacaagcagctgttcctggaaaagaccttcaaagtgaccaagaaggccctggaacggttcttcaaacaagagaatgtgtcctaccacgatatcggcggcatcgacgacaagatcaacgcctccatgaaggcctacaacgacttcaagcggatcttcggcgaggcctacatcgaaatgcaccgggatgagatcgagaacatcatccggtggatcaccctgttttgcgacgagaagaagatgctcgagacaaagatccgcaagacgtaccctcagatccccgatgataagatcaaggccattaagaagctgaagtacaaggactggggcagactgagcgccacactgctggattctggcaagatcgcctacgaggatgccagcgtgggcgagagaatcaccatcatctctgccctgcggcacaccaacaagaatttcatggaactgctgagcagcaactgccagtacgacttcatcggcaagattaaggacttcaacggctccaagcagagcgacaatggcaagctgacctacaaggatgtggaagaactgtacgtgtcccctagcgtgaagcggagcatctggcagaccctgaccattctggaagagatcaagaaaatcatgggctgcgagcccaagcgcatcttcatcgagatggccagaagcaaagaggaaagcctgcggaccaacagcaggctgcagagactccaggacctgtacaagaagtgcaaagaagagaacatcgacttcatgcccaaggccgacgagctgaccgacatcagatctcagctccagtgcaagaacgaagaggacctgcggagcgacaagctgtacctgtactacacccagatggggagatgcatgtacaccggcgagaggatcgaactggccagcctgtacgaccagaacaaatacgacgtggacgccatctaccccaggtctaagaccaaggacgacagcctgaacaatcgggtgctcgtgaagaaagagattaacagcgccaagacagacaactaccccatcgacgctgacatccggaagaaaatgcacgccttttggaagatgctgtacgacaagggcttcatcgaccaaaagaagtacgagcggctgaccagaagcacccagctgacagatgaagaactggctggcttcatcaaccggcagctggtggaaaccagacagagcacaaaggccaccgccgacattctgaagtctgcctacgagcacagcgaggtggtgtatgtgaaggccggcaacgtgtccgatttccggcagcagttcgacttcgtgaagtgccgggaagtgaacgacctgcaccacgccaaggacgcctacctgaatatcgtcgtgggcaactgctaccacgtcaagttcaccatcaatccgctgatgttcatccggggcaaccaggacaaccggcggtactctctgaagcccgaggtgttctacgcccacgacattaagcggaacggggagattgcttggctggccggcgataatggcaccatggccacagtgaagagagtgatgcagaaaaacaacgtgctgttcacccggctggccgtggaaggcaaaggcgagctgttcaagcagaaccctctgaaggccaagagcggccagctgcctcttaaagccggcctgagcatcgataagtatggcggctacgactccctgagcaccgcctattttgccctggtggaatccgagggcaagaaaggcgccgtgcagtttacaatcgaggccattcctctggtgtacgccaaacagggcgaagccaccatcaagaaatacctgacagaggtggtgcagctgtgcaagcccgagatcaaagtgatgcggatcaagaagtactccctgctgaagatcaatggcttccccatgcacatctccggcagaaccggaaagcagctgatcttctacgtggccagccagctgtgtatcgacgagaacagcgtggcctatctgaagaaagccctgaagtatgagagcaacctcgaggaaaacgaggccatcctggccgataagaatgccgacgagtccatgaagcagaaagccttcaaccggctcatgttctacaaggacacctggggaatcagcgccgaggctaacctgcagctgtacgatatgctgctggctaagagcgccaacaacctctacaagaacagacccgccagccagaccgccactctgaaagagaagagagagcagttcgccaagctgagcctgagcaagcagatccacgtgatcaaagagatcctgaacctgttcaagtgcgcctccgccagcgccgatttcaagctgcttgataagggcgctgcctgcggcatcctgaaagtgtccaacaacatcaccaagctgaagcagtgcgtgctgatcaatcagagccccaccggcgtgttcgagcaagaggttgacctgatgagactgcctaggggcggcggaggcagctacccctatgatgtacctgattatgcttctggcggacccaagaagaagaggaaagtcggtggttctcctaagaaaaagagaaaggtcggatccggc

SEQ ID NO: 1716 - DNA, 5790 bp, synthetic construct
  source 1..5790: mol_type = other DNA; note mammalian_codon_optimized_tethered_system_MG151-98-H171N-16 6AA_MG71-2n_16AA_linker
atgaagaggaccgctgatggttccgaatttgaatctcctaagaagaaacgaaaggttgacaatattaagcaattatctgtgttgcctggactgtccgaggacccttccgcagtcggcttgcttcaggtgaaagagcagcaggtgcctattgcgactaaggcagttcatcgcagacagtataggacaaatcgggactcattattaccaattcacaaattgatccggcagctggaaagtcagggcgtcatcagcagaacccattcccccttcaacagccccatttggcctgtgaggaaggcctcaggcgaatggcgactgaccgtggactacagggggttgaatgaagtcacccctccgttaagtgcagccgtgccggatatgctggaattgcagtatgagctggaatccaaagcagctaaatggtatgctactatcgacatagccaatgcattcttttccatccctcttgccagggagtgtaggccccagttcgcctttacatggaggggcatccaatatacttggaatcgcctgcctcagggttggaagcatagtcccacaatctgcaacggcctcatccaaactgtgctcgagcaggggagcgcacctgagcacctgcagtacattgacgatattgtggtgtggggcgacaccgccgaggacgtgttcaagaaaggagagcaaattatacagatcttgctgcaggccggcttcgcaatcaaacgaagcaaggtgaaggggcccgctcaggagatccagttcttaggcattaaatggcaggacggccgccgccacatcccagcagatgtcatcgataagatcacagcaatgtcaccccccattaacaaaaaagaaacgcagtcttttctgggcgtagttggattttggaggatgcacgtcccaaactactcccttattgtgtcaccattgtatcaggtgactcgtaaaaaaaatgacttcacctggggacctgaacagcagcaggcatttgagcagattaaacatgaaatcgcccgggccgtagcactgggaccggtaaggacaggccaggatgtgaaaaacatcttatacacagctgctggcgaaaaaggtcctacatggagcctgtggcagcgtacttccggtgagactagggggcgccctctcgggttctggagccgggcttaccgggggtccgaggaatgctataccccaactgaaaaagaaatactcgcagcatatgaaggtgtgcgagcggcaagtgaagtggttggaactgagacccagctcttgctggcaccccgcctgccagtgctcaactggatgtttaaggggaaaataccctccacccaccacgcgaccgacgcaacctggtctaagtggattgcactcattacacaacgcgcccggatgggcaacttctccaggccgggcatattggaggtcataatggactggccggagggaaagaaattcgagacctcccctggcgaatccgggagcgaaacacctgggacttctgaaagcgctactcccgagtctgcatgccagaacaagaagaacgtcgactactacgtcggcctggacatgggagatgcctctgttggatgggccgtgaccgacctgaactacaacatcctgaagttcaacggcaaggccctgtggggcatcagactgttcgattctgccgaaaccgccgctgccagaagaggctttagatctgccaggcggcggatcgacagagtgtcttggagaatctccatgctgcaagagctgttcgccgacgagatcgccaaagtggatgccggcttcttccagcggctgaaggatagcagactgcaggtcgaggacaagcaagagaaaaccgcctacaacctgttcgtgggccagaactacaccgacaaggacttctaccagcagtaccccaccatgtaccacctgagatacgccctggctacacaggccggaccttttgatgtgcggctgctgtatctggccgtgcagcacatcgtgaagcaccggggccactttctgttcgagaacctggacgccagcaaagtgggcgatttcgtggccgtgtttggcgaggtggaaagctacgtgcacgacgagatggaactggacgagtggtactgccacgacatcgatgccctggccaaggtgctgtgcaatgccaatctgggcatcaccgccaagcagaaggccatccagaatctgctgcccgccaagaccaagcaagaaaaggccatcgtgcagctgctgagcggcggaaaggccaagctgtgcgacctgttctgtgacgaggaactggccgaatgcgagaaaaagagcatcagcttccaagaggacaacctcgatgagctggaacccatcctggaagctatcctgcaagagagatacgaggccctgctgcggttcaaggccgtgtatgattggagcctgctggccaagatcctgagactggacgccgacaagaaaagcgagaacgagatgcacctcctgagcgagtgcaaagtgaaggtgtacgaggaacacaagaaagacctggctgtgctgaagtccatgctgaagggcaagcccctgtacaacaagctgttcagacaggacggcgaggacacctacgccaattacgcccagggaatcaaagggatcaaccaggtggacttctgcaagtccctgaagaagcagctggaatctatcggcgagtacaagaaacagatgcagcagctgaccagcttcgaggacgcccagaccgatgtggaaagactgctgtttagagtggccaacggcctggctttccccaagcagaccaccaaggacaacggcatcatcccaatccaggttcacctggccgagctgcagtgtatcctggctcacgccgagaagtacctgcctttcctgaagaacgccgacgccaatggcctgagcgtgcgggaaaagatcacccagatcgtgaagttcagaatcccctactacgtgggacccctggccggcacaagactgtctagagaacagggcagatgctgggtcgagcggagagccgagctgaagaatgagaagatctacccctggaacttcgacaaggtggtggacctggaagcctccgccgagaacttcatcaccaacatgaccgccaagtgcacctacctcgtgggcgaagatgtgctccccaaagagtccctgctgtactccgagttcatggtccgaaacgccctgaacaacctgaccatcgacggcgagagactgcccgtttctctgctgcagaaaatctacaagcagctgttcctggaaaagaccttcaaagtgaccaagaaggccctggaacggttcttcaaacaagagaatgtgtcctaccacgatatcggcggcatcgacgacaagatcaacgcctccatgaaggcctacaacgacttcaagcggatcttcggcgaggcctacatcgaaatgcaccgggatgagatcgagaacatcatccggtggatcaccctgttttgcgacgagaagaagatgctcgagacaaagatccgcaagacgtaccctcagatccccgatgataagatcaaggccattaagaagctgaagtacaaggactggggcagactgagcgccacactgctggattctggcaagatcgcctacgaggatgccagcgtgggcgagagaatcaccatcatctctgccctgcggcacaccaacaagaatttcatggaactgctgagcagcaactgccagtacgacttcatcggcaagattaaggacttcaacggctccaagcagagcgacaatggcaagctgacctacaaggatgtggaagaactgtacgtgtcccctagcgtgaagcggagcatctggcagaccctgaccattctggaagagatcaagaaaatcatgggctgcgagcccaagcgcatcttcatcgagatggccagaagcaaagaggaaagcctgcggaccaacagcaggctgcagagactccaggacctgtacaagaagtgcaaagaagagaacatcgacttcatgcccaaggccgacgagctgaccgacatcagatctcagctccagtgcaagaacgaagaggacctgcggagcgacaagctgtacctgtactacacccagatggggagatgcatgtacaccggcgagaggatcgaactggccagcctgtacgaccagaacaaatacgacgtggacgccatctaccccaggtctaagaccaaggacgacagcctgaacaatcgggtgctcgtgaagaaagagattaacagcgccaagacagacaactaccccatcgacgctgacatccggaagaaaatgcacgccttttggaagatgctgtacgacaagggcttcatcgaccaaaagaagtacgagcggctgaccagaagcacccagctgacagatgaagaactggctggcttcatcaaccggcagctggtggaaaccagacagagcacaaaggccaccgccgacattctgaagtctgcctacgagcacagcgaggtggtgtatgtgaaggccggcaacgtgtccgatttccggcagcagttcgacttcgtgaagtgccgggaagtgaacgacctgcaccacgccaaggacgcctacctgaatatcgtcgtgggcaactgctaccacgtcaagttcaccatcaatccgctgatgttcatccggggcaaccaggacaaccggcggtactctctgaagcccgaggtgttctacgcccacgacattaagcggaacggggagattgcttggctggccggcgataatggcaccatggccacagtgaagagagtgatgcagaaaaacaacgtgctgttcacccggctggccgtggaaggcaaaggcgagctgttcaagcagaaccctctgaaggccaagagcggccagctgcctcttaaagccggcctgagcatcgataagtatggcggctacgactccctgagcaccgcctattttgccctggtggaatccgagggcaagaaaggcgccgtgcagtttacaatcgaggccattcctctggtgtacgccaaacagggcgaagccaccatcaagaaatacctgacagaggtggtgcagctgtgcaagcccgagatcaaagtgatgcggatcaagaagtactccctgctgaagatcaatggcttccccatgcacatctccggcagaaccggaaagcagctgatcttctacgtggccagccagctgtgtatcgacgagaacagcgtggcctatctgaagaaagccctgaagtatgagagcaacctcgaggaaaacgaggccatcctggccgataagaatgccgacgagtccatgaagcagaaagccttcaaccggctcatgttctacaaggacacctggggaatcagcgccgaggctaacctgcagctgtacgatatgctgctggctaagagcgccaacaacctctacaagaacagacccgccagccagaccgccactctgaaagagaagagagagcagttcgccaagctgagcctgagcaagcagatccacgtgatcaaagagatcctgaacctgttcaagtgcgcctccgccagcgccgatttcaagctgcttgataagggcgctgcctgcggcatcctgaaagtgtccaacaacatcaccaagctgaagcagtgcgtgctgatcaatcagagccccaccggcgtgttcgagcaagaggttgacctgatgagactgcctaggggcggcggaggcagctacccctatgatgtacctgattatgcttctggcggacccaagaagaagaggaaagtcggtggttctcctaagaaaaagagaaaggtcggatccggc

SEQ ID NO: 1717 - DNA, 5820 bp, synthetic construct
  source 1..5820: mol_type = other DNA; note mammalian_codon_optimized_tethered_system_MG151-98-H171N-16 6AA_MG71-2n_26AA_linker
atgaagaggaccgctgatggttccgaatttgaatctcctaagaagaaacgaaaggttgacaatattaagcaattatctgtgttgcctggactgtccgaggacccttccgcagtcggcttgcttcaggtgaaagagcagcaggtgcctattgcgactaaggcagttcatcgcagacagtataggacaaatcgggactcattattaccaattcacaaattgatccggcagctggaaagtcagggcgtcatcagcagaacccattcccccttcaacagccccatttggcctgtgaggaaggcctcaggcgaatggcgactgaccgtggactacagggggttgaatgaagtcacccctccgttaagtgcagccgtgccggatatgctggaattgcagtatgagctggaatccaaagcagctaaatggtatgctactatcgacatagccaatgcattcttttccatccctcttgccagggagtgtaggccccagttcgcctttacatggaggggcatccaatatacttggaatcgcctgcctcagggttggaagcatagtcccacaatctgcaacggcctcatccaaactgtgctcgagcaggggagcgcacctgagcacctgcagtacattgacgatattgtggtgtggggcgacaccgccgaggacgtgttcaagaaaggagagcaaattatacagatcttgctgcaggccggcttcgcaatcaaacgaagcaaggtgaaggggcccgctcaggagatccagttcttaggcattaaatggcaggacggccgccgccacatcccagcagatgtcatcgataagatcacagcaatgtcaccccccattaacaaaaaagaaacgcagtcttttctgggcgtagttggattttggaggatgcacgtcccaaactactcccttattgtgtcaccattgtatcaggtgactcgtaaaaaaaatgacttcacctggggacctgaacagcagcaggcatttgagcagattaaacatgaaatcgcccgggccgtagcactgggaccggtaaggacaggccaggatgtgaaaaacatcttatacacagctgctggcgaaaaaggtcctacatggagcctgtggcagcgtacttccggtgagactagggggcgccctctcgggttctggagccgggcttaccgggggtccgaggaatgctataccccaactgaaaaagaaatactcgcagcatatgaaggtgtgcgagcggcaagtgaagtggttggaactgagacccagctcttgctggcaccccgcctgccagtgctcaactggatgtttaaggggaaaataccctccacccaccacgcgaccgacgcaacctggtctaagtggattgcactcattacacaacgcgcccggatgggcaacttctccaggccgggcatattggaggtcataatggactggccggagggaaagaaattcgagacctcccctggcgaaggcggcggcggctctggtggcggcggtagcgaagccgccgctgccaaaggtggcggtgggtcaggtggcggcgggtccgcatgccagaacaagaagaacgtcgactactacgtcggcctggacatgggagatgcctctgttggatgggccgtgaccgacctgaactacaacatcctgaagttcaacggcaaggccctgtggggcatcagactgttcgattctgccgaaaccgccgctgccagaagaggctttagatctgccaggcggcggatcgacagagtgtcttggagaatctccatgctgcaagagctgttcgccgacgagatcgccaaagtggatgccggcttcttccagcggctgaaggatagcagactgcaggtcgaggacaagcaagagaaaaccgcctacaacctgttcgtgggccagaactacaccgacaaggacttctaccagcagtaccccaccatgtaccacctgagatacgccctggctacacaggccggaccttttgatgtgcggctgctgtatctggccgtgcagcacatcgtgaagcaccggggccactttctgttcgagaacctggacgccagcaaagtgggcgatttcgtggccgtgtttggcgaggtggaaagctacgtgcacgacgagatggaactggacgagtggtactgccacgacatcgatgccctggccaaggtgctgtgcaatgccaatctgggcatcaccgccaagcagaaggccatccagaatctgctgcccgccaagaccaagcaagaaaaggccatcgtgcagctgctgagcggcggaaaggccaagctgtgcgacctgttctgtgacgaggaactggccgaatgcgagaaaaagagcatcagcttccaagaggacaacctcgatgagctggaacccatcctggaagctatcctgcaagagagatacgaggccctgctgcggttcaaggccgtgtatgattggagcctgctggccaagatcctgagactggacgccgacaagaaaagcgagaacgagatgcacctcctgagcgagtgcaaagtgaaggtgtacgaggaacacaagaaagacctggctgtgctgaagtccatgctgaagggcaagcccctgtacaacaagctgttcagacaggacggcgaggacacctacgccaattacgcccagggaatcaaagggatcaaccaggtggacttctgcaagtccctgaagaagcagctggaatctatcggcgagtacaagaaacagatgcagcagctgaccagcttcgaggacgcccagaccgatgtggaaagactgctgtttagagtggccaacggcctggctttccccaagcagaccaccaaggacaacggcatcatcccaatccaggttcacctggccgagctgcagtgtatcctggctcacgccgagaagtacctgcctttcctgaagaacgccgacgccaatggcctgagcgtgcgggaaaagatcacccagatcgtgaagttcagaatcccctactacgtgggacccctggccggcacaagactgtctagagaacagggcagatgctgggtcgagcggagagccgagctgaagaatgagaagatctacccctggaacttcgacaaggtggtggacctggaagcctccgccgagaacttcatcaccaacatgaccgccaagtgcacctacctcgtgggcgaagatgtgctccccaaagagtccctgctgtactccgagttcatggtccgaaacgccctgaacaacctgaccatcgacggcgagagactgcccgtttctctgctgcagaaaatctacaagcagctgttcctggaaaagaccttcaaagtgaccaagaaggccctggaacggttcttcaaacaagagaatgtgtcctaccacgatatcggcggcatcgacgacaagatcaacgcctccatgaaggcctacaacgacttcaagcggatcttcggcgaggcctacatcgaaatgcaccgggatgagatcgagaacatcatccggtggatcaccctgttttgcgacgagaagaagatgctcgagacaaagatccgcaagacgtaccctcagatccccgatgataagatcaaggccattaagaagctgaagtacaaggactggggcagactgagcgccacactgctggattctggcaagatcgcctacgaggatgccagcgtgggcgagagaatcaccatcatctctgccctgcggcacaccaacaagaatttcatggaactgctgagcagcaactgccagtacgacttcatcggcaagattaaggacttcaacggctccaagcagagcgacaatggcaagctgacctacaaggatgtggaagaactgtacgtgtcccctagcgtgaagcggagcatctggcagaccctgaccattctggaagagatcaagaaaatcatgggctgcgagcccaagcgcatcttcatcgagatggccagaagcaaagaggaaagcctgcggaccaacagcaggctgcagagactccaggacctgtacaagaagtgcaaagaagagaacatcgacttcatgcccaaggccgacgagctgaccgacatcagatctcagctccagtgcaagaacgaagaggacctgcggagcgacaagctgtacctgtactacacccagatggggagatgcatgtacaccggcgagaggatcgaactggccagcctgtacgaccagaacaaatacgacgtggacgccatctaccccaggtctaagaccaaggacgacagcctgaacaatcgggtgctcgtgaagaaagagattaacagcgccaagacagacaactaccccatcgacgctgacatccggaagaaaatgcacgccttttggaagatgctgtacgacaagggcttcatcgaccaaaagaagtacgagcggctgaccagaagcacccagctgacagatgaagaactggctggcttcatcaaccggcagctggtggaaaccagacagagcacaaaggccaccgccgacattctgaagtctgcctacgagcacagcgaggtggtgtatgtgaaggccggcaacgtgtccgatttccggcagcagttcgacttcgtgaagtgccgggaagtgaacgacctgcaccacgccaaggacgcctacctgaatatcgtcgtgggcaactgctaccacgtcaagttcaccatcaatccgctgatgttcatccggggcaaccaggacaaccggcggtactctctgaagcccgaggtgttctacgcccacgacattaagcggaacggggagattgcttggctggccggcgataatggcaccatggccacagtgaagagagtgatgcagaaaaacaacgtgctgttcacccggctggccgtggaaggcaaaggcgagctgttcaagcagaaccctctgaaggccaagagcggccagctgcctcttaaagccggcctgagcatcgataagtatggcggctacgactccctgagcaccgcctattttgccctggtggaatccgagggcaagaaaggcgccgtgcagtttacaatcgaggccattcctctggtgtacgccaaacagggcgaagccaccatcaagaaatacctgacagaggtggtgcagctgtgcaagcccgagatcaaagtgatgcggatcaagaagtactccctgctgaagatcaatggcttccccatgcacatctccggcagaaccggaaagcagctgatcttctacgtggccagccagctgtgtatcgacgagaacagcgtggcctatctgaagaaagccctgaagtatgagagcaacctcgaggaaaacgaggccatcctggccgataagaatgccgacgagtccatgaagcagaaagccttcaaccggctcatgttctacaaggacacctggggaatcagcgccgaggctaacctgcagctgtacgatatgctgctggctaagagcgccaacaacctctacaagaacagacccgccagccagaccgccactctgaaagagaagagagagcagttcgccaagctgagcctgagcaagcagatccacgtgatcaaagagatcctgaacctgttcaagtgcgcctccgccagcgccgatttcaagctgcttgataagggcgctgcctgcggcatcctgaaagtgtccaacaacatcaccaagctgaagcagtgcgtgctgatcaatcagagccccaccggcgtgttcgagcaagaggttgacctgatgagactgcctaggggcggcggaggcagctacccctatgatgtacctgattatgcttctggcggacccaagaagaagaggaaagtcggtggttctcctaagaaaaagagaaaggtcggatccggc

SEQ ID NO: 1718 - DNA, 5838 bp, synthetic construct
  source 1..5838: mol_type = other DNA; note mammalian_codon_optimized_tethered_system_MG151-98-H171N-16 6AA_MG71-2n_32AA_linker
atgaagaggaccgctgatggttccgaatttgaatctcctaagaagaaacgaaaggttgacaatattaagcaattatctgtgttgcctggactgtccgaggacccttccgcagtcggcttgcttcaggtgaaagagcagcaggtgcctattgcgactaaggcagttcatcgcagacagtataggacaaatcgggactcattattaccaattcacaaattgatccggcagctggaaagtcagggcgtcatcagcagaacccattcccccttcaacagccccatttggcctgtgaggaaggcctcaggcgaatggcgactgaccgtggactacagggggttgaatgaagtcacccctccgttaagtgcagccgtgccggatatgctggaattgcagtatgagctggaatccaaagcagctaaatggtatgctactatcgacatagccaatgcattcttttccatccctcttgccagggagtgtaggccccagttcgcctttacatggaggggcatccaatatacttggaatcgcctgcctcagggttggaagcatagtcccacaatctgcaacggcctcatccaaactgtgctcgagcaggggagcgcacctgagcacctgcagtacattgacgatattgtggtgtggggcgacaccgccgaggacgtgttcaagaaaggagagcaaattatacagatcttgctgcaggccggcttcgcaatcaaacgaagcaaggtgaaggggcccgctcaggagatccagttcttaggcattaaatggcaggacggccgccgccacatcccagcagatgtcatcgataagatcacagcaatgtcaccccccattaacaaaaaagaaacgcagtcttttctgggcgtagttggattttggaggatgcacgtcccaaactactcccttattgtgtcaccattgtatcaggtgactcgtaaaaaaaatgacttcacctggggacctgaacagcagcaggcatttgagcagattaaacatgaaatcgcccgggccgtagcactgggaccggtaaggacaggccaggatgtgaaaaacatcttatacacagctgctggcgaaaaaggtcctacatggagcctgtggcagcgtacttccggtgagactagggggcgccctctcgggttctggagccgggcttaccgggggtccgaggaatgctataccccaactgaaaaagaaatactcgcagcatatgaaggtgtgcgagcggcaagtgaagtggttggaactgagacccagctcttgctggcaccccgcctgccagtgctcaactggatgtttaaggggaaaataccctccacccaccacgcgaccgacgcaacctggtctaagtggattgcactcattacacaacgcgcccggatgggcaacttctccaggccgggcatattggaggtcataatggactggccggagggaaagaaattcgagacctcccctggcgaaagtggtggcagctccggcggctcttctggctccgaaactcctggcacttctgaatccgccaccccagagagtagtggcggtagctcaggcggaagtgcatgccagaacaagaagaacgtcgactactacgtcggcctggacatgggagatgcctctgttggatgggccgtgaccgacctgaactacaacatcctgaagttcaacggcaaggccctgtggggcatcagactgttcgattctgccgaaaccgccgctgccagaagaggctttagatctgccaggcggcggatcgacagagtgtcttggagaatctccatgctgcaagagctgttcgccgacgagatcgccaaagtggatgccggcttcttccagcggctgaaggatagcagactgcaggtcgaggacaagcaagagaaaaccgcctacaacctgttcgtgggccagaactacaccgacaaggacttctaccagcagtaccccaccatgtaccacctgagatacgccctggctacacaggccggaccttttgatgtgcggctgctgtatctggccgtgcagcacatcgtgaagcaccggggccactttctgttcgagaacctggacgccagcaaagtgggcgatttcgtggccgtgtttggcgaggtggaaagctacgtgcacgacgagatggaactggacgagtggtactgccacgacatcgatgccctggccaaggtgctgtgcaatgccaatctgggcatcaccgccaagcagaaggccatccagaatctgctgcccgccaagaccaagcaagaaaaggccatcgtgcagctgctgagcggcggaaaggccaagctgtgcgacctgttctgtgacgaggaactggccgaatgcgagaaaaagagcatcagcttccaagaggacaacctcgatgagctggaacccatcctggaagctatcctgcaagagagatacgaggccctgctgcggttcaaggccgtgtatgattggagcctgctggccaagatcctgagactggacgccgacaagaaaagcgagaacgagatgcacctcctgagcgagtgcaaagtgaaggtgtacgaggaacacaagaaagacctggctgtgctgaagtccatgctgaagggcaagcccctgtacaacaagctgttcagacaggacggcgaggacacctacgccaattacgcccagggaatcaaagggatcaaccaggtggacttctgcaagtccctgaagaagcagctggaatctatcggcgagtacaagaaacagatgcagcagctgaccagcttcgaggacgcccagaccgatgtggaaagactgctgtttagagtggccaacggcctggctttccccaagcagaccaccaaggacaacggcatcatcccaatccaggttcacctggccgagctgcagtgtatcctggctcacgccgagaagtacctgcctttcctgaagaacgccgacgccaatggcctgagcgtgcgggaaaagatcacccagatcgtgaagttcagaatcccctactacgtgggacccctggccggcacaagactgtctagagaacagggcagatgctgggtcgagcggagagccgagctgaagaatgagaagatctacccctggaacttcgacaaggtggtggacctggaagcctccgccgagaacttcatcaccaacatgaccgccaagtgcacctacctcgtgggcgaagatgtgctccccaaagagtccctgctgtactccgagttcatggtccgaaacgccctgaacaacctgaccatcgacggcgagagactgcccgtttctctgctgcagaaaatctacaagcagctgttcctggaaaagaccttcaaagtgaccaagaaggccctggaacggttcttcaaacaagagaatgtgtcctaccacgatatcggcggcatcgacgacaagatcaacgcctccatgaaggcctacaacgacttcaagcggatcttcggcgaggcctacatcgaaatgcaccgggatgagatcgagaacatcatccggtggatcaccctgttttgcgacgagaagaagatgctcgagacaaagatccgcaagacgtaccctcagatccccgatgataagatcaaggccattaagaagctgaagtacaaggactggggcagactgagcgccacactgctggattctggcaagatcgcctacgaggatgccagcgtgggcgagagaatcaccatcatctctgccctgcggcacaccaacaagaatttcatggaactgctgagcagcaactgccagtacgacttcatcggcaagattaaggacttcaacggctccaagcagagcgacaatggcaagctgacctacaaggatgtggaagaactgtacgtgtcccctagcgtgaagcggagcatctggcagaccctgaccattctggaagagatcaagaaaatcatgggctgcgagcccaagcgcatcttcatcgagatggccagaagcaaagaggaaagcctgcggaccaacagcaggctgcagagactccaggacctgtacaagaagtgcaaagaagagaacatcgacttcatgcccaaggccgacgagctgaccgacatcagatctcagctccagtgcaagaacgaagaggacctgcggagcgacaagctgtacctgtactacacccagatggggagatgcatgtacaccggcgagaggatcgaactggccagcctgtacgaccagaacaaatacgacgtggacgccatctaccccaggtctaagaccaaggacgacagcctgaacaatcgggtgctcgtgaagaaagagattaacagcgccaagacagacaactaccccatcgacgctgacatccggaagaaaatgcacgccttttggaagatgctgtacgacaagggcttcatcgaccaaaagaagtacgagcggctgaccagaagcacccagctgacagatgaagaactggctggcttcatcaaccggcagctggtggaaaccagacagagcacaaaggccaccgccgacattctgaagtctgcctacgagcacagcgaggtggtgtatgtgaaggccggcaacgtgtccgatttccggcagcagttcgacttcgtgaagtgccgggaagtgaacgacctgcaccacgccaaggacgcctacctgaatatcgtcgtgggcaactgctaccacgtcaagttcaccatcaatccgctgatgttcatccggggcaaccaggacaaccggcggtactctctgaagcccgaggtgttctacgcccacgacattaagcggaacggggagattgcttggctggccggcgataatggcaccatggccacagtgaagagagtgatgcagaaaaacaacgtgctgttcacccggctggccgtggaaggcaaaggcgagctgttcaagcagaaccctctgaaggccaagagcggccagctgcctcttaaagccggcctgagcatcgataagtatggcggctacgactccctgagcaccgcctattttgccctggtggaatccgagggcaagaaaggcgccgtgcagtttacaatcgaggccattcctctggtgtacgccaaacagggcgaagccaccatcaagaaatacctgacagaggtggtgcagctgtgcaagcccgagatcaaagtgatgcggatcaagaagtactccctgctgaagatcaatggcttccccatgcacatctccggcagaaccggaaagcagctgatcttctacgtggccagccagctgtgtatcgacgagaacagcgtggcctatctgaagaaagccctgaagtatgagagcaacctcgaggaaaacgaggccatcctggccgataagaatgccgacgagtccatgaagcagaaagccttcaaccggctcatgttctacaaggacacctggggaatcagcgccgaggctaacctgcagctgtacgatatgctgctggctaagagcgccaacaacctctacaagaacagacccgccagccagaccgccactctgaaagagaagagagagcagttcgccaagctgagcctgagcaagcagatccacgtgatcaaagagatcctgaacctgttcaagtgcgcctccgccagcgccgatttcaagctgcttgataagggcgctgcctgcggcatcctgaaagtgtccaacaacatcaccaagctgaagcagtgcgtgctgatcaatcagagccccaccggcgtgttcgagcaagaggttgacctgatgagactgcctaggggcggcggaggcagctacccctatgatgtacctgattatgcttctggcggacccaagaagaagaggaaagtcggtggttctcctaagaaaaagagaaaggtcggatccggc

SEQ ID NO: 1719 - DNA, 5874 bp, synthetic construct
  source 1..5874: mol_type = other DNA; note mammalian_codon_optimized_tethered_system_MG151-98-H171N-16 6AA_MG71-2n_44AA_linker
atgaagaggaccgctgatggttccgaatttgaatctcctaagaagaaacgaaaggttgacaatattaagcaattatctgtgttgcctggactgtccgaggacccttccgcagtcggcttgcttcaggtgaaagagcagcaggtgcctattgcgactaaggcagttcatcgcagacagtataggacaaatcgggactcattattaccaattcacaaattgatccggcagctggaaagtcagggcgtcatcagcagaacccattcccccttcaacagccccatttggcctgtgaggaaggcctcaggcgaatggcgactgaccgtggactacagggggttgaatgaagtcacccctccgttaagtgcagccgtgccggatatgctggaattgcagtatgagctggaatccaaagcagctaaatggtatgctactatcgacatagccaatgcattcttttccatccctcttgccagggagtgtaggccccagttcgcctttacatggaggggcatccaatatacttggaatcgcctgcctcagggttggaagcatagtcccacaatctgcaacggcctcatccaaactgtgctcgagcaggggagcgcacctgagcacctgcagtacattgacgatattgtggtgtggggcgacaccgccgaggacgtgttcaagaaaggagagcaaattatacagatcttgctgcaggccggcttcgcaatcaaacgaagcaaggtgaaggggcccgctcaggagatccagttcttaggcattaaatggcaggacggccgccgccacatcccagcagatgtcatcgataagatcacagcaatgtcaccccccattaacaaaaaagaaacgcagtcttttctgggcgtagttggattttggaggatgcacgtcccaaactactcccttattgtgtcaccattgtatcaggtgactcgtaaaaaaaatgacttcacctggggacctgaacagcagcaggcatttgagcagattaaacatgaaatcgcccgggccgtagcactgggaccggtaaggacaggccaggatgtgaaaaacatcttatacacagctgctggcgaaaaaggtcctacatggagcctgtggcagcgtacttccggtgagactagggggcgccctctcgggttctggagccgggcttaccgggggtccgaggaatgctataccccaactgaaaaagaaatactcgcagcatatgaaggtgtgcgagcggcaagtgaagtggttggaactgagacccagctcttgctggcaccccgcctgccagtgctcaactggatgtttaaggggaaaataccctccacccaccacgcgaccgacgcaacctggtctaagtggattgcactcattacacaacgcgcccggatgggcaacttctccaggccgggcatattggaggtcataatggactggccggagggaaagaaattcgagacctcccctggcgaaaaaggaaaaggtaaaggaatgggagctgggacgctctccactgataaaggggagagtttggggattaaatatgaagaaggacagtcacacagacccactaatccaaatgcgtctcgcatggcgcagaaggtggcatgccagaacaagaagaacgtcgactactacgtcggcctggacatgggagatgcctctgttggatgggccgtgaccgacctgaactacaacatcctgaagttcaacggcaaggccctgtggggcatcagactgttcgattctgccgaaaccgccgctgccagaagaggctttagatctgccaggcggcggatcgacagagtgtcttggagaatctccatgctgcaagagctgttcgccgacgagatcgccaaagtggatgccggcttcttccagcggctgaaggatagcagactgcaggtcgaggacaagcaagagaaaaccgcctacaacctgttcgtgggccagaactacaccgacaaggacttctaccagcagtaccccaccatgtaccacctgagatacgccctggctacacaggccggaccttttgatgtgcggctgctgtatctggccgtgcagcacatcgtgaagcaccggggccactttctgttcgagaacctggacgccagcaaagtgggcgatttcgtggccgtgtttggcgaggtggaaagctacgtgcacgacgagatggaactggacgagtggtactgccacgacatcgatgccctggccaaggtgctgtgcaatgccaatctgggcatcaccgccaagcagaaggccatccagaatctgctgcccgccaagaccaagcaagaaaaggccatcgtgcagctgctgagcggcggaaaggccaagctgtgcgacctgttctgtgacgaggaactggccgaatgcgagaaaaagagcatcagcttccaagaggacaacctcgatgagctggaacccatcctggaagctatcctgcaagagagatacgaggccctgctgcggttcaaggccgtgtatgattggagcctgctggccaagatcctgagactggacgccgacaagaaaagcgagaacgagatgcacctcctgagcgagtgcaaagtgaaggtgtacgaggaacacaagaaagacctggctgtgctgaagtccatgctgaagggcaagcccctgtacaacaagctgttcagacaggacggcgaggacacctacgccaattacgcccagggaatcaaagggatcaaccaggtggacttctgcaagtccctgaagaagcagctggaatctatcggcgagtacaagaaacagatgcagcagctgaccagcttcgaggacgcccagaccgatgtggaaagactgctgtttagagtggccaacggcctggctttccccaagcagaccaccaaggacaacggcatcatcccaatccaggttcacctggccgagctgcagtgtatcctggctcacgccgagaagtacctgcctttcctgaagaacgccgacgccaatggcctgagcgtgcgggaaaagatcacccagatcgtgaagttcagaatcccctactacgtgggacccctggccggcacaagactgtctagagaacagggcagatgctgggtcgagcggagagccgagctgaagaatgagaagatctacccctggaacttcgacaaggtggtggacctggaagcctccgccgagaacttcatcaccaacatgaccgccaagtgcacctacctcgtgggcgaagatgtgctccccaaagagtccctgctgtactccgagttcatggtccgaaacgccctgaacaacctgaccatcgacggcgagagactgcccgtttctctgctgcagaaaatctacaagcagctgttcctggaaaagaccttcaaagtgaccaagaaggccctggaacggttcttcaaacaagagaatgtgtcctaccacgatatcggcggcatcgacgacaagatcaacgcctccatgaaggcctacaacgacttcaagcggatcttcggcgaggcctacatcgaaatgcaccgggatgagatcgagaacatcatccggtggatcaccctgttttgcgacgagaagaagatgctcgagacaaagatccgcaagacgtaccctcagatccccgatgataagatcaaggccattaagaagctgaagtacaaggactggggcagactgagcgccacactgctggattctggcaagatcgcctacgaggatgccagcgtgggcgagagaatcaccatcatctctgccctgcggcacaccaacaagaatttcatggaactgctgagcagcaactgccagtacgacttcatcggcaagattaaggacttcaacggctccaagcagagcgacaatggcaagctgacctacaaggatgtggaagaactgtacgtgtcccctagcgtgaagcggagcatctggcagaccctgaccattctggaagagatcaagaaaatcatgggctgcgagcccaagcgcatcttcatcgagatggccagaagcaaagaggaaagcctgcggaccaacagcaggctgcagagactccaggacctgtacaagaagtgcaaagaagagaacatcgacttcatgcccaaggccgacgagctgaccgacatcagatctcagctccagtgcaagaacgaagaggacctgcggagcgacaagctgtacctgtactacacccagatggggagatgcatgtacaccggcgagaggatcgaactggccagcctgtacgaccagaacaaatacgacgtggacgccatctaccccaggtctaagaccaaggacgacagcctgaacaatcgggtgctcgtgaagaaagagattaacagcgccaagacagacaactaccccatcgacgctgacatccggaagaaaatgcacgccttttggaagatgctgtacgacaagggcttcatcgaccaaaagaagtacgagcggctgaccagaagcacccagctgacagatgaagaactggctggcttcatcaaccggcagctggtggaaaccagacagagcacaaaggccaccgccgacattctgaagtctgcctacgagcacagcgaggtggtgtatgtgaaggccggcaacgtgtccgatttccggcagcagttcgacttcgtgaagtgccgggaagtgaacgacctgcaccacgccaaggacgcctacctgaatatcgtcgtgggcaactgctaccacgtcaagttcaccatcaatccgctgatgttcatccggggcaaccaggacaaccggcggtactctctgaagcccgaggtgttctacgcccacgacattaagcggaacggggagattgcttggctggccggcgataatggcaccatggccacagtgaagagagtgatgcagaaaaacaacgtgctgttcacccggctggccgtggaaggcaaaggcgagctgttcaagcagaaccctctgaaggccaagagcggccagctgcctcttaaagccggcctgagcatcgataagtatggcggctacgactccctgagcaccgcctattttgccctggtggaatccgagggcaagaaaggcgccgtgcagtttacaatcgaggccattcctctggtgtacgccaaacagggcgaagccaccatcaagaaatacctgacagaggtggtgcagctgtgcaagcccgagatcaaagtgatgcggatcaagaagtactccctgctgaagatcaatggcttccccatgcacatctccggcagaaccggaaagcagctgatcttctacgtggccagccagctgtgtatcgacgagaacagcgtggcctatctgaagaaagccctgaagtatgagagcaacctcgaggaaaacgaggccatcctggccgataagaatgccgacgagtccatgaagcagaaagccttcaaccggctcatgttctacaaggacacctggggaatcagcgccgaggctaacctgcagctgtacgatatgctgctggctaagagcgccaacaacctctacaagaacagacccgccagccagaccgccactctgaaagagaagagagagcagttcgccaagctgagcctgagcaagcagatccacgtgatcaaagagatcctgaacctgttcaagtgcgcctccgccagcgccgatttcaagctgcttgataagggcgctgcctgcggcatcctgaaagtgtccaacaacatcaccaagctgaagcagtgcgtgctgatcaatcagagccccaccggcgtgttcgagcaagaggttgacctgatgagactgcctaggggcggcggaggcagctacccctatgatgtacctgattatgcttctggcggacccaagaagaagaggaaagtcggtggttctcctaagaaaaagagaaaggtcggatccggc

SEQ ID NO: 1720 - DNA, 5916 bp, synthetic construct
  source 1..5916: mol_type = other DNA; note mammalian_codon_optimized_tethered_system_MG151-98-H171N-16 6AA_MG71-2n_58AA_linker
atgaagaggaccgctgatggttccgaatttgaatctcctaagaagaaacgaaaggttgacaatattaagcaattatctgtgttgcctggactgtccgaggacccttccgcagtcggcttgcttcaggtgaaagagcagcaggtgcctattgcgactaaggcagttcatcgcagacagtataggacaaatcgggactcattattaccaattcacaaattgatccggcagctggaaagtcagggcgtcatcagcagaacccattcccccttcaacagccccatttggcctgtgaggaaggcctcaggcgaatggcgactgaccgtggactacagggggttgaatgaagtcacccctccgttaagtgcagccgtgccggatatgctggaattgcagtatgagctggaatccaaagcagctaaatggtatgctactatcgacatagccaatgcattcttttccatccctcttgccagggagtgtaggccccagttcgcctttacatggaggggcatccaatatacttggaatcgcctgcctcagggttggaagcatagtcccacaatctgcaacggcctcatccaaactgtgctcgagcaggggagcgcacctgagcacctgcagtacattgacgatattgtggtgtggggcgacaccgccgaggacgtgttcaagaaaggagagcaaattatacagatcttgctgcaggccggcttcgcaatcaaacgaagcaaggtgaaggggcccgctcaggagatccagttcttaggcattaaatggcaggacggccgccgccacatcccagcagatgtcatcgataagatcacagcaatgtcaccccccattaacaaaaaagaaacgcagtcttttctgggcgtagttggattttggaggatgcacgtcccaaactactcccttattgtgtcaccattgtatcaggtgactcgtaaaaaaaatgacttcacctggggacctgaacagcagcaggcatttgagcagattaaacatgaaatcgcccgggccgtagcactgggaccggtaaggacaggccaggatgtgaaaaacatcttatacacagctgctggcgaaaaaggtcctacatggagcctgtggcagcgtacttccggtgagactagggggcgccctctcgggttctggagccgggcttaccgggggtccgaggaatgctataccccaactgaaaaagaaatactcgcagcatatgaaggtgtgcgagcggcaagtgaagtggttggaactgagacccagctcttgctggcaccccgcctgccagtgctcaactggatgtttaaggggaaaataccctccacccaccacgcgaccgacgcaacctggtctaagtggattgcactcattacacaacgcgcccggatgggcaacttctccaggccgggcatattggaggtcataatggactggccggagggaaagaaattcgagacctcccctggcgaatgttatggtaagaaatatggacccaaaggaaaaggtaaaggtatgggtgccggcacgttatctacggataaaggagagagtctcggtatcaaatatgaagaagggcaaagccacaggcccaccaatcctaatgcatcccggatggcccagaaagtcggcggcagcgacggatgcgcatgccagaacaagaagaacgtcgactactacgtcggcctggacatgggagatgcctctgttggatgggccgtgaccgacctgaactacaacatcctgaagttcaacggcaaggccctgtggggcatcagactgttcgattctgccgaaaccgccgctgccagaagaggctttagatctgccaggcggcggatcgacagagtgtcttggagaatctccatgctgcaagagctgttcgccgacgagatcgccaaagtggatgccggcttcttccagcggctgaaggatagcagactgcaggtcgaggacaagcaagagaaaaccgcctacaacctgttcgtgggccagaactacaccgacaaggacttctaccagcagtaccccaccatgtaccacctgagatacgccctggctacacaggccggaccttttgatgtgcggctgctgtatctggccgtgcagcacatcgtgaagcaccggggccactttctgttcgagaacctggacgccagcaaagtgggcgatttcgtggccgtgtttggcgaggtggaaagctacgtgcacgacgagatggaactggacgagtggtactgccacgacatcgatgccctggccaaggtgctgtgcaatgccaatctgggcatcaccgccaagcagaaggccatccagaatctgctgcccgccaagaccaagcaagaaaaggccatcgtgcagctgctgagcggcggaaaggccaagctgtgcgacctgttctgtgacgaggaactggccgaatgcgagaaaaagagcatcagcttccaagaggacaacctcgatgagctggaacccatcctggaagctatcctgcaagagagatacgaggccctgctgcggttcaaggccgtgtatgattggagcctgctggccaagatcctgagactggacgccgacaagaaaagcgagaacgagatgcacctcctgagcgagtgcaaagtgaaggtgtacgaggaacacaagaaagacctggctgtgctgaagtccatgctgaagggcaagcccctgtacaacaagctgttcagacaggacggcgaggacacctacgccaattacgcccagggaatcaaagggatcaaccaggtggacttctgcaagtccctgaagaagcagctggaatctatcggcgagtacaagaaacagatgcagcagctgaccagcttcgaggacgcccagaccgatgtggaaagactgctgtttagagtggccaacggcctggctttccccaagcagaccaccaaggacaacggcatcatcccaatccaggttcacctggccgagctgcagtgtatcctggctcacgccgagaagtacctgcctttcctgaagaacgccgacgccaatggcctgagcgtgcgggaaaagatcacccagatcgtgaagttcagaatcccctactacgtgggacccctggccggcacaagactgtctagagaacagggcagatgctgggtcgagcggagagccgagctgaagaatgagaagatctacccctggaacttcgacaaggtggtggacctggaagcctccgccgagaacttcatcaccaacatgaccgccaagtgcacctacctcgtgggcgaagatgtgctccccaaagagtccctgctgtactccgagttcatggtccgaaacgccctgaacaacctgaccatcgacggcgagagactgcccgtttctctgctgcagaaaatctacaagcagctgttcctggaaaagaccttcaaagtgaccaagaaggccctggaacggttcttcaaacaagagaatgtgtcctaccacgatatcggcggcatcgacgacaagatcaacgcctccatgaaggcctacaacgacttcaagcggatcttcggcgaggcctacatcgaaatgcaccgggatgagatcgagaacatcatccggtggatcaccctgttttgcgacgagaagaagatgctcgagacaaagatccgcaagacgtaccctcagatccccgatgataagatcaaggccattaagaagctgaagtacaaggactggggcagactgagcgccacactgctggattctggcaagatcgcctacgaggatgccagcgtgggcgagagaatcaccatcatctctgccctgcggcacaccaacaagaatttcatggaactgctgagcagcaactgccagtacgacttcatcggcaagattaaggacttcaacggctccaagcagagcgacaatggcaagctgacctacaaggatgtggaagaactgtacgtgtcccctagcgtgaagcggagcatctggcagaccctgaccattctggaagagatcaagaaaatcatgggctgcgagcccaagcgcatcttcatcgagatggccagaagcaaagaggaaagcctgcggaccaacagcaggctgcagagactccaggacctgtacaagaagtgcaaagaagagaacatcgacttcatgcccaaggccgacgagctgaccgacatcagatctcagctccagtgcaagaacgaagaggacctgcggagcgacaagctgtacctgtactacacccagatggggagatgcatgtacaccggcgagaggatcgaactggccagcctgtacgaccagaacaaatacgacgtggacgccatctaccccaggtctaagaccaaggacgacagcctgaacaatcgggtgctcgtgaagaaagagattaacagcgccaagacagacaactaccccatcgacgctgacatccggaagaaaatgcacgccttttggaagatgctgtacgacaagggcttcatcgaccaaaagaagtacgagcggctgaccagaagcacccagctgacagatgaagaactggctggcttcatcaaccggcagctggtggaaaccagacagagcacaaaggccaccgccgacattctgaagtctgcctacgagcacagcgaggtggtgtatgtgaaggccggcaacgtgtccgatttccggcagcagttcgacttcgtgaagtgccgggaagtgaacgacctgcaccacgccaaggacgcctacctgaatatcgtcgtgggcaactgctaccacgtcaagttcaccatcaatccgctgatgttcatccggggcaaccaggacaaccggcggtactctctgaagcccgaggtgttctacgcccacgacattaagcggaacggggagattgcttggctggccggcgataatggcaccatggccacagtgaagagagtgatgcagaaaaacaacgtgctgttcacccggctggccgtggaaggcaaaggcgagctgttcaagcagaaccctctgaaggccaagagcggccagctgcctcttaaagccggcctgagcatcgataagtatggcggctacgactccctgagcaccgcctattttgccctggtggaatccgagggcaagaaaggcgccgtgcagtttacaatcgaggccattcctctggtgtacgccaaacagggcgaagccaccatcaagaaatacctgacagaggtggtgcagctgtgcaagcccgagatcaaagtgatgcggatcaagaagtactccctgctgaagatcaatggcttccccatgcacatctccggcagaaccggaaagcagctgatcttctacgtggccagccagctgtgtatcgacgagaacagcgtggcctatctgaagaaagccctgaagtatgagagcaacctcgaggaaaacgaggccatcctggccgataagaatgccgacgagtccatgaagcagaaagccttcaaccggctcatgttctacaaggacacctggggaatcagcgccgaggctaacctgcagctgtacgatatgctgctggctaagagcgccaacaacctctacaagaacagacccgccagccagaccgccactctgaaagagaagagagagcagttcgccaagctgagcctgagcaagcagatccacgtgatcaaagagatcctgaacctgttcaagtgcgcctccgccagcgccgatttcaagctgcttgataagggcgctgcctgcggcatcctgaaagtgtccaacaacatcaccaagctgaagcagtgcgtgctgatcaatcagagccccaccggcgtgttcgagcaagaggttgacctgatgagactgcctaggggcggcggaggcagctacccctatgatgtacctgattatgcttctggcggacccaagaagaagaggaaagtcggtggttctcctaagaaaaagagaaaggtcggatccggc

SEQ ID NO: 1721 - skipped

SEQ ID NO: 1722 - RNA, 113 nt, synthetic construct
  source 1..113: mol_type = other RNA; note = hPDK1_MG3-6-3-8_guide_G1
  modified_base 1..3: mod_base = OTHER; note = 2'O-methyl ribonucleotide
  modified_base 1..4: mod_base = OTHER; note = phosphorothioate linkage
  modified_base 111..113: mod_base = OTHER; note = 2'O-methyl ribonucleotide
  modified_base 110..113: mod_base = OTHER; note = phosphorothioate linkage
cgtaggttccccagagagcagggttgagaatcgaaagattcttaataaggcatccttccgatgctgacttctcaccgtccgttatccaataggagcgggcggtatgttttttt

SEQ ID NO: 1723 - RNA, 113 nt, synthetic construct
  source 1..113: mol_type = other RNA; note = hPDK1_MG3-6-3-8_guide_G2
  modified_base 1..3: mod_base = OTHER; note = 2'O-methyl ribonucleotide
  modified_base 1..4: mod_base = OTHER; note = phosphorothioate linkage
  modified_base 111..113: mod_base = OTHER; note = 2'O-methyl ribonucleotide
  modified_base 110..113: mod_base = OTHER; note = phosphorothioate linkage
aggcaggggcatctgtctgtctgttgagaatcgaaagattcttaataaggcatccttccgatgctgacttctcaccgtccgttatccaataggagcgggcggtatgttttttt

SEQ ID NO: 1724 - RNA, 113 nt, synthetic construct
  source 1..113: mol_type = other RNA; note = hPDK1_MG3-6-3-8_guide_G3
  modified_base 1..3: mod_base = OTHER; note = 2'O-methyl ribonucleotide
  modified_base 1..4: mod_base = OTHER; note = phosphorothioate linkage
  modified_base 111..113: mod_base = OTHER; note = 2'O-methyl ribonucleotide
  modified_base 110..113: mod_base = OTHER; note = phosphorothioate linkage
caagggagctggggaggggaccgttgagaatcgaaagattcttaataaggcatccttccgatgctgacttctcaccgtccgttatccaataggagcgggcggtatgttttttt

SEQ ID NO: 1725 - RNA, 113 nt, synthetic construct
  source 1..113: mol_type = other RNA; note = hPDK1_MG3-6-3-8_guide_G4
  modified_base 1..3: mod_base = OTHER; note = 2'O-methyl ribonucleotide
  modified_base 1..4: mod_base = OTHER; note = phosphorothioate linkage
  modified_base 111..113: mod_base = OTHER; note = 2'O-methyl ribonucleotide
  modified_base 110..113: mod_base = OTHER; note = phosphorothioate linkage
tccttcccaagggagctggggagttgagaatcgaaagattcttaataaggcatccttccgatgctgacttctcaccgtccgttatccaataggagcgggcggtatgttttttt

SEQ ID NO: 1726 - RNA, 113 nt, synthetic construct
  source 1..113: mol_type = other RNA; note = hPDK1_MG3-6-3-8_guide_G5
  modified_base 1..3: mod_base = OTHER; note = 2'O-methyl ribonucleotide
  modified_base 1..4: mod_base = OTHER; note = phosphorothioate linkage
  modified_base 111..113: mod_base = OTHER; note = 2'O-methyl ribonucleotide
  modified_base 110..113: mod_base = OTHER; note = phosphorothioate linkage
gtccttcccaagggagctgggggttgagaatcgaaagattcttaataaggcatccttccgatgctgacttctcaccgtccgttatccaataggagcgggcggtatgttttttt

SEQ ID NO: 1727 - RNA, 113 nt, synthetic construct
  source 1..113: mol_type = other RNA; note = A1AT_MG3-6-3-8_guide_G1
  modified_base 1..3: mod_base = OTHER; note = 2'O-methyl ribonucleotide
  modified_base 1..4: mod_base = OTHER; note = phosphorothioate linkage
  modified_base 111..113: mod_base = OTHER; note = 2'O-methyl ribonucleotide
  modified_base 110..113: mod_base = OTHER; note = phosphorothioate linkage
cgtgtctctgcttctctcccctgttgagaatcgaaagattcttaataaggcatccttccgatgctgacttctcaccgtccgttatccaataggagcgggcggtatgttttttt

SEQ ID NO: 1728 - RNA, 113 nt, synthetic construct
  source 1..113: mol_type = other RNA; note = A1AT_MG3-6-3-8_guide_G2
  modified_base 1..3: mod_base = OTHER; note = 2'O-methyl ribonucleotide
  modified_base 1..4: mod_base = OTHER; note = phosphorothioate linkage
  modified_base 111..113: mod_base = OTHER; note = 2'O-methyl ribonucleotide
  modified_base 110..113: mod_base = OTHER; note = phosphorothioate linkage
tctctcccctccaggccgtgcagttgagaatcgaaagattcttaataaggcatccttccgatgctgacttctcaccgtccgttatccaataggagcgggcggtatgttttttt

SEQ ID NO: 1729 - RNA, 113 nt, synthetic construct
  source 1..113: mol_type = other RNA; note = G6PC1_Q347*_MG3-6-3-8_guide_G1
  modified_base 1..3: mod_base = OTHER; note = 2'O-methyl ribonucleotide
  modified_base 1..4: mod_base = OTHER; note = phosphorothioate linkage
  modified_base 111..113: mod_base = OTHER; note = 2'O-methyl ribonucleotide
  modified_base 110..113: mod_base = OTHER; note = phosphorothioate linkage
ctgcaagagtgcggtagtgcccgttgagaatcgaaagattcttaataaggcatccttccgatgctgacttctcaccgtccgttatccaataggagcgggcggtatgttttttt

SEQ ID NO: 1730 - RNA, 113 nt, synthetic construct
  source 1..113: mol_type = other RNA; note = G6PC1_Q347*_MG3-6-3-8_guide_G2
  modified_base 1..3: mod_base = OTHER; note = 2'O-methyl ribonucleotide
  modified_base 1..4: mod_base = OTHER; note = phosphorothioate linkage
  modified_base 111..113: mod_base = OTHER; note = 2'O-methyl ribonucleotide
  modified_base 110..113: mod_base = OTHER; note = phosphorothioate linkage
gcggtagtgcccctggcatccggttgagaatcgaaagattcttaataaggcatccttccgatgctgacttctcaccgtccgttatccaataggagcgggcggtatgttttttt

SEQ ID NO: 1731 - RNA, 113 nt, synthetic construct
  source 1..113: mol_type = other RNA; note = G6PC1_Q347*_MG3-6-3-8_guide_G3
  modified_base 1..3: mod_base = OTHER; note = 2'O-methyl ribonucleotide
  modified_base 1..4: mod_base = OTHER; note = phosphorothioate linkage
  modified_base 111..113: mod_base = OTHER; note = 2'O-methyl ribonucleotide
  modified_base 110..113: mod_base = OTHER; note = phosphorothioate linkage
gtgtcatcccctactgcctcgcgttgagaatcgaaagattcttaataaggcatccttccgatgctgacttctcaccgtccgttatccaataggagcgggcggtatgttttttt

SEQ ID NO: 1732 - RNA, 113 nt, synthetic construct
  source 1..113: mol_type = other RNA; note = G6PC1_Q347*_MG3-6-3-8_guide_G4
  modified_base 1..3: mod_base = OTHER; note = 2'O-methyl ribonucleotide
  modified_base 1..4: mod_base = OTHER; note = phosphorothioate linkage
  modified_base 111..113: mod_base = OTHER; note = 2'O-methyl ribonucleotide
  modified_base 110..113: mod_base = OTHER; note = phosphorothioate linkage
tgtcatcccctactgcctcgccgttgagaatcgaaagattcttaataaggcatccttccgatgctgacttctcaccgtccgttatccaataggagcgggcggtatgttttttt

SEQ ID NO: 1733 - RNA, 113 nt, synthetic construct
  source 1..113: mol_type = other RNA; note = G6PC1_Q347*_MG3-6-3-8_guide_G5
  modified_base 1..3: mod_base = OTHER; note = 2'O-methyl ribonucleotide
  modified_base 1..4: mod_base = OTHER; note = phosphorothioate linkage
  modified_base 111..113: mod_base = OTHER; note = 2'O-methyl ribonucleotide
  modified_base 110..113: mod_base = OTHER; note = phosphorothioate linkage
acgacttcttgtgcggctggccgttgagaatcgaaagattcttaataaggcatccttccgatgctgacttctcaccgtccgttatccaataggagcgggcggtatgttttttt

SEQ ID NO: 1734 - RNA, 113 nt, synthetic construct
  source 1..113: mol_type = other RNA; note = G6PC1_Q347*_MG3-6-3-8_guide_G6
  modified_base 1..3: mod_base = OTHER; note = 2'O-methyl ribonucleotide
  modified_base 1..4: mod_base = OTHER; note = phosphorothioate linkage
  modified_base 111..113: mod_base = OTHER; note = 2'O-methyl ribonucleotide
  modified_base 110..113: mod_base = OTHER; note = phosphorothioate linkage
aacgacttcttgtgcggctggcgttgagaatcgaaagattcttaataaggcatccttccgatgctgacttctcaccgtccgttatccaataggagcgggcggtatgttttttt

SEQ ID NO: 1735 - RNA, 113 nt, synthetic construct
  source 1..113: mol_type = other RNA; note = G6PC1_Q347*_MG3-6-3-8_guide_G7
  modified_base 1..3: mod_base = OTHER; note = 2'O-methyl ribonucleotide
  modified_base 1..4: mod_base = OTHER; note = phosphorothioate linkage
  modified_base 111..113: mod_base = OTHER; note = 2'O-methyl ribonucleotide
  modified_base 110..113: mod_base = OTHER; note = phosphorothioate linkage
cttacaacgacttcttgtgcgggttgagaatcgaaagattcttaataaggcatccttccgatgctgacttctcaccgtccgttatccaataggagcgggcggtatgttttttt

SEQ ID NO: 1736 - RNA, 113 nt, synthetic construct
  source 1..113: mol_type = other RNA; note = G6PC1_R83C_MG3-6-3-8_guide_G1
  modified_base 1..3: mod_base = OTHER; note = 2'O-methyl ribonucleotide
  modified_base 1..4: mod_base = OTHER; note = phosphorothioate linkage
  modified_base 111..113: mod_base = OTHER; note = 2'O-methyl ribonucleotide
  modified_base 110..113: mod_base = OTHER; note = phosphorothioate linkage
cagaaacttgttctgtttttccgttgagaatcgaaagattcttaataaggcatccttccgatgctgacttctcaccgtccgttatccaataggagcgggcggtatgttttttt

SEQ ID NO: 1737 - RNA, 113 nt, synthetic construct
  source 1..113: mol_type = other RNA; note = G6PC1_R83C_MG3-6-3-8_guide_G2
  modified_base 1..3: mod_base = OTHER; note = 2'O-methyl ribonucleotide
  modified_base 1..4: mod_base = OTHER; note = phosphorothioate linkage
  modified_base 111..113: mod_base = OTHER; note = 2'O-methyl ribonucleotide
  modified_base 110..113: mod_base = OTHER; note = phosphorothioate linkage
agaaacttgttctgtttttccagttgagaatcgaaagattcttaataaggcatccttccgatgctgacttctcaccgtccgttatccaataggagcgggcggtatgttttttt

SEQ ID NO: 1738 - RNA, 113 nt, synthetic construct
  source 1..113: mol_type = other RNA; note = G6PC1_R83C_MG3-6-3-8_guide_G3
  modified_base 1..3: mod_base = OTHER; note = 2'O-methyl ribonucleotide
  modified_base 1..4: mod_base = OTHER; note = phosphorothioate linkage
  modified_base 111..113: mod_base = OTHER; note = 2'O-methyl ribonucleotide
  modified_base 110..113: mod_base = OTHER; note = phosphorothioate linkage
ttttccataggattctctttgggttgagaatcgaaagattcttaataaggcatccttccgatgctgacttctcaccgtccgttatccaataggagcgggcggtatgttttttt

SEQ ID NO: 1739 - RNA, 113 nt, synthetic construct
  source 1..113: mol_type = other RNA; note = G6PC1_R83C_MG3-6-3-8_guide_G4
  modified_base 1..3: mod_base = OTHER; note = 2'O-methyl ribonucleotide
  modified_base 1..4: mod_base = OTHER; note = phosphorothioate linkage
  modified_base 111..113: mod_base = OTHER; note = 2'O-methyl ribonucleotide
  modified_base 110..113: mod_base = OTHER; note = phosphorothioate linkage
agtagtcagtatccaaaacccagttgagaatcgaaagattcttaataaggcatccttccgatgctgacttctcaccgtccgttatccaataggagcgggcggtatgttttttt

SEQ ID NO: 1740 - RNA, 113 nt, synthetic construct
  source 1..113: mol_type = other RNA; note = G6PC1_R83C_MG3-6-3-8_guide_G5
  modified_base 1..3: mod_base = OTHER; note = 2'O-methyl ribonucleotide
  modified_base 1..4: mod_base = OTHER; note = phosphorothioate linkage
  modified_base 111..113: mod_base = OTHER; note = 2'O-methyl ribonucleotide
  modified_base 110..113: mod_base = OTHER; note = phosphorothioate linkage
cacggaagtgttgctgtagtaggttgagaatcgaaagattcttaataaggcatccttccgatgctgacttctcaccgtccgttatccaataggagcgggcggtatgttttttt

SEQ ID NO: 1741 - RNA, 113 nt, synthetic construct
  source 1..113: mol_type = other RNA; note = PAH_R408W_MG3-6-3-8_guide_G1
  modified_base 1..3: mod_base = OTHER; note = 2'O-methyl ribonucleotide
  modified_base 1..4: mod_base = OTHER; note = phosphorothioate linkage
  modified_base 111..113: mod_base = OTHER; note = 2'O-methyl ribonucleotide
  modified_base 110..113: mod_base = OTHER; note = phosphorothioate linkage
atggtgcccttcactcaagcctgttgagaatcgaaagattcttaataaggcatccttccgatgctgacttctcaccgtccgttatccaataggagcgggcggtatgttttttt

SEQ ID NO: 1742 - RNA, 113 nt, synthetic construct
  source 1..113: mol_type = other RNA; note = PAH_R408W_MG3-6-3-8_guide_G2
  modified_base 1..3: mod_base = OTHER; note = 2'O-methyl ribonucleotide
  modified_base 1..4: mod_base = OTHER; note = phosphorothioate linkage
  modified_base 111..113: mod_base = OTHER; note = 2'O-methyl ribonucleotide
  modified_base 110..113: mod_base = OTHER; note = phosphorothioate linkage
cccttcactcaagcctgtggttgttgagaatcgaaagattcttaataaggcatccttccgatgctgacttctcaccgtccgttatccaataggagcgggcggtatgttttttt

SEQ ID NO: 1743 - RNA, 113 nt, synthetic construct
  source 1..113: mol_type = other RNA; note = PAH_R408W_MG3-6-3-8_guide_G3
  modified_base 1..3: mod_base = OTHER; note = 2'O-methyl ribonucleotide
  modified_base 1..4: mod_base = OTHER; note = phosphorothioate linkage
  modified_base 111..113: mod_base = OTHER; note = 2'O-methyl ribonucleotide
  modified_base 110..113: mod_base = OTHER; note = phosphorothioate linkage
ctcaagcctgtggttttggtctgttgagaatcgaaagattcttaataaggcatccttccgatgctgacttctcaccgtccgttatccaataggagcgggcggtatgttttttt

SEQ ID NO: 1744 - RNA, 113 nt, synthetic construct
  source 1..113: mol_type = other RNA; note = PAH_R408W_MG3-6-3-8_guide_G4
  modified_base 1..3: mod_base = OTHER; note = 2'O-methyl ribonucleotide
  modified_base 1..4: mod_base = OTHER; note = phosphorothioate linkage
  modified_base 111..113: mod_base = OTHER; note = 2'O-methyl ribonucleotide
  modified_base 110..113: mod_base = OTHER; note = phosphorothioate linkage
ggaactttgctgccacaataccgttgagaatcgaaagattcttaataaggcatccttccgatgctgacttctcaccgtccgttatccaataggagcgggcggtatgttttttt

SEQ ID NO: 1745 - RNA, 113 nt, synthetic construct
  source 1..113: mol_type = other RNA; note = PAH_R408W_MG3-6-3-8_guide_G5
  modified_base 1..3: mod_base = OTHER; note = 2'O-methyl ribonucleotide
  modified_base 1..4: mod_base = OTHER; note = phosphorothioate linkage
  modified_base 111..113: mod_base = OTHER; note = 2'O-methyl ribonucleotide
  modified_base 110..113: mod_base = OTHER; note = phosphorothioate linkage
tcgtagcgaactgagaagggccgttgagaatcgaaagattcttaataaggcatccttccgatgctgacttctcaccgtccgttatccaataggagcgggcggtatgttttttt

SEQ ID NO: 1746 - RNA, 113 nt, synthetic construct
  source 1..113: mol_type = other RNA; note = PAH_R408W_MG3-6-3-8_guide_G6
  modified_base 1..3: mod_base = OTHER; note = 2'O-methyl ribonucleotide
  modified_base 1..4: mod_base = OTHER; note = phosphorothioate linkage
  modified_base 111..113: mod_base = OTHER; note = 2'O-methyl ribonucleotide
  modified_base 110..113: mod_base = OTHER; note = phosphorothioate linkage
gtatgggtcgtagcgaactgaggttgagaatcgaaagattcttaataaggcatccttccgatgctgacttctcaccgtccgttatccaataggagcgggcggtatgttttttt

SEQ ID NO: 1747 - RNA, 113 nt, synthetic construct
  source 1..113: mol_type = other RNA; note = PAH_R408W_MG3-6-3-8_guide_G7
  modified_base 1..3: mod_base = OTHER; note = 2'O-methyl ribonucleotide
  modified_base 1..4: mod_base = OTHER; note = phosphorothioate linkage
  modified_base 111..113: mod_base = OTHER; note = 2'O-methyl ribonucleotide
  modified_base 110..113: mod_base = OTHER; note = phosphorothioate linkage
tgtatgggtcgtagcgaactgagttgagaatcgaaagattcttaataaggcatccttccgatgctgacttctcaccgtccgttatccaataggagcgggcggtatgttttttt

SEQ ID NO: 1748 - RNA, 113 nt, synthetic construct
  source 1..113: mol_type = other RNA; note = PAH_R408W_MG3-6-3-8_guide_G8
  modified_base 1..3: mod_base = OTHER; note = 2'O-methyl ribonucleotide
  modified_base 1..4: mod_base = OTHER; note = phosphorothioate linkage
  modified_base 10..12: mod_base = OTHER; note = 2'O-methyl ribonucleotide
  modified_base 10..13: mod_base = OTHER; note = phosphorothioate linkage
  modified_base 111..113: mod_base = OTHER; note = 2'O-methyl ribonucleotide
  modified_base 110..113: mod_base = OTHER; note = phosphorothioate linkage
aagacctcaatcctttgggtgtgttgagaatcgaaagattcttaataaggcatccttccgatgctgacttctcaccgtccgttatccaataggagcgggcggtatgttttttt

SEQ ID NO: 1749 - RNA, 113 nt, synthetic construct
  source 1..113: mol_type = other RNA; note = PAH_R408W_MG3-6-3-8_guide_G9
  modified_base 1..3: mod_base = OTHER; note = 2'O-methyl ribonucleotide
  modified_base 1..4: mod_base = OTHER; note = phosphorothioate linkage
  modified_base 111..113: mod_base = OTHER; note = 2'O-methyl ribonucleotide
  modified_base 110..113: mod_base = OTHER; note = phosphorothioate linkage
attgtccaagacctcaatccttgttgagaatcgaaagattcttaataaggcatccttccgatgctgacttctcaccgtccgttatccaataggagcgggcggtatgttttttt

SEQ ID NO: 1750 - DNA, 41 bp, synthetic construct
  source 1..41: mol_type = other DNA; note = G6PC1_R83C_forward_NGS_primer
gctcttccgatctnnnnntcccttctagaggcaacatgtga

SEQ ID NO: 1751 - DNA, 41 bp, synthetic construct
  source 1..41: mol_type = other DNA; note = G6PC1_R83C_reverse_NGS_primer
gctcttccgatctnnnnnggtaaacgaggtccactcagctt

SEQ ID NO: 1752 - DNA, 275 bp, synthetic construct
  source 1..275: mol_type = other DNA; note = G6PC1_R83C_targeted_amplified_ngs
tcccttctagaggcaacatgtgaaatccttctcaggctacactcttcttgaaggtgtaggctttgggcaaaagcattcattcagtaaccccagaaacttgttctgtttttccataggattctctttggacagcgtccatactggtgggttttggatactgactactacagcaacacttccgtgcccctgataaagcagttccctgtaacctgtgagactggaccaggtaagcgtcccagcccctgcagacagaagctgagtggacctcgtttacc

SEQ ID NO: 1753 - DNA, 5754 bp, synthetic construct
  source 1..5754: mol_type = other DNA; note mammalian_codon_optimized_tethered_system_MG3-6-3-8n-MMLV2- 33AA_linker
atgaagaggaccgctgatggttccgaatttgaatctcctaagaagaaacgaaaggttatgtcaacggacatgaagaactatcgtatcggggtcgacgtgggtgatcgaagcgtaggcctcgcagcgattgaatttgacgatgacggactgcctatacagaaactcgcattagtcaccttccgtcacgatggtggtctggatcctactaagaacaagacccctatgagtcgcaaggagacgcggggaatagccaggagaaccatgcgaatgaacagagagcggaaaagacggctccgtaacctggacaatgttttagaaaacttgggctactcagtcccggaaggaccagaacctgagacatatgaagcctggacctctcgggctcttctggcatccattaagctcgcaagtgccgatgagctgaatgaacatttggttagagcggtcagacatatggctcgacacaggggatgggccaatccgtggtggtctttagatcagctcgaaaaggctagtcaggagccaagcgagacattcgagatcatcctggcacgcgctagggagctgttcggagaaaaggtgcccgctaaccctacattaggtatgctgggcgccttagcggctaacaatgaggtactgcttcgacccagggacgagaagaaacgaaagaccggctacgtgagaggtacacccttaatgttcgcgcaggtcaggcagggagatcagctcgcggagctccgtcgaatctgcgaagttcaagggatcgaagatcaatatgaagctctgagattaggggtgttcgatcacaagcacccttacgtccctaaggaacgcgtcggaaaagacccactgaatccgagcacgaaccggaccatccgggctagtttggagttccaggaatttagaatattagattccgttgctaacctgagggtgagaatcggctcccgagctaaacgggagcttaccgaggcagagtacgacgcggccgtcgaatttcttatggattacgccgacaaggagcagccttcctgggctgacgttgcagagaaaatcggcgtacctggtaacaggctggtggcacccgtgttagaggacgtgcagcagaaaactgctccctatgataggtcttccgcggcatttgaaaaggcaatgggaaagaagaccgaagccagacagtggtgggaaagcactgatgatgaccaactgcggagtctcctgattgctttcctggtcgacgccaccaatgataccgaggaagcagcggcagaagccggacttagtgagttatataaatcatggcccgccgaggagagggaagcactctctaatatcgacttcgaaaagggaagagtggcctactcacaggaaaccttgagcaagttgtccgaatacatgcacgaataccgagttggcttgcatgaggccagaaaggctgtctttggggtcgacgatacatggcgcccaccacttgataaactggaagagcctacaggacagcctgctgtcgaccgcgttcttacaatactcaggcggttcgtgctggactgcgagcgccagtggggtcggcccagagccatcaccgtcgagcatacaaggactggattgatgggaccaacgcagcggcagaaaattcttaacgaacagaagaagaatcgggctgacaatgagcgtatccgcgacgaacttcgggaaagcggggtagataacccatcacgggcggaagttcggcgtcatttgatagtgcaagaacaggagtgccagtgtctgtattgtgggacaatgatcaccactaccactagtgaactggacgccatagtgccgcgggccggtggcggctcaagtaggcgtgagaacttggccgccgtctgtcgcgcttgtaatgccaagaagaaaagggagttattttatgcatgggccgggccggtgaagtcccaggagactatcgagagggtgagacagcttaaagccttcaaagactccaagaaagccaagatgtttaagaatcagatccgacgattaaatcagaccgaagcagatgaaccgatagacgagcgttctcttgcatccacttcatacgccgcagtcgctgtcagggagcggttagaacaacattttaacgagggtctggcacttgatgataaatcccgagtggtactggacgtgtatgccggcgctgtgacaagagagagtcgccgggcgggcgggatcgacgagcggattttattaaggggcgaacgggataagaaccgattcgacgttaggcaccatgcagtcgacgctgcagtgatgacactgcttaataggtccgtggcactgaccctggagcaacgtagccagctgcggcgcgccttctatgaacagggactggacaagctggaccgcgaccaacttaagcctgaagaggactggagaaacttcatcggcctgagcctggcatcccaggagaaattcttggagtggaagaaagtgaccacagtgctcggagacttgctggctgaggcaatagaagatgacagcattgcggttgtatcaccactccgccttagaccccagaacggaagggtgcacaaggacaccatagccgctgtgaagaagcagacactcggttccgcctggagcgccgatgccgttaagagaatcgtggaccctgaaatttatcttgccatgaaagacgctctgggcaagagcaaggtgctcccagaagactctgcacgaaccctggaactgagcgatgggcgctacctggaagccgacgacgaagtcttgttcttccccaagaacgccgcatctattctgacacctcgcggggttgctgagattggtgggtcaatacaccacgcacggctctacagctggctgaccaagaagggagaactgaagatcgggatgcttagagtctacggggccgagttcccttggctgatgagggaaagtgggagccacgacgttctgaggatgccaattcaccccggcagtcagtctttcagagatatgcaagatacaactaggaaggcggtggagagcagcgaagccgtcgagttcgcatggatcacacagaatgacgagctcgaatttgagccggaggactatatcgcccacggcggtaaggacgaactgcggcagttcctcgagttcatgccagagtgccggtggagagtcgatggctttaagaagaattatcagatcagaatcagaccagccatgctgtcacgagaacagctgccatccgatatacagaggcggctggagtctaaaacactgaccgagaatgaaagcttgctgctcaaggctcttgacacgggactcgtggttgcgatcggcggacttctcccattaggcaccttgaaggtgatacggcgaaacaatcttggatttcccagatggcgcggcaatggaaatcttccgacatcttttgaggtacgcagctccgctctccgagccctgggagtagaaggttctggcggcagcagcggcggctcaagcggaagtgaaacacctggaacttccgaaagcgctacgcctgaatcttctggtggatcttctggcggatcttccgcatgcactctgaacatcgaggacgaatacaggctccacgaaacttctaaggaacctgacgtgtccttgggatcaacttggttgtccgacttcccccaagcttgggccgagacaggcggaatgggtttggccgtgagacaggccccactcataatcccacttaaggcgacatccactccggtcagtatcaagcagtatccaatgtcccaggaagcacgcttaggaattaaaccacatattcaacgactcctggatcaaggtattctcgtcccatgtcaaagcccttggaatacccctcttctgcctgtgaagaagcccggcacaaacgactaccggcccgtgcaagacctcagggaagtgaataaacgagtcgaggatatacatccgactgtcccgaatccctataatctgctgtcaggtctgccaccaagtcatcaatggtatacagtactggacctgaaagacgcgttcttttgtttgcgactgcatcctacgtctcaaccgctgtttgcattcgaatggcgggaccccgaaatggggatttctgggcagctgacatggactcgtcttcctcaagggtttaagaactcccctacacttttcaacgaagccctgcatcgggatttagctgattttagaatccaacatcctgatctgattctcctgcaatatgttgacgatctgctcctcgctgcaaccagtgaacttgattgtcagcagggaacgagagctttactccagactctgggcaatcttggttaccgtgcttcagctaagaaggctcagatatgtcaaaagcaagtgaaataccttggttacctgttgaaggaagggcaacgctggttaaccgaagctcgcaaggaaacagtaatgggccaacccacacccaaaacaccccgccagctgagagaatttctcggtaaggctggattttgcagactgttcattcccggtttcgccgagatggccgcacctctttatccactgacgaagcccggtaccctcttcaactggggacccgatcagcagaaagcttaccaggagattaaacaggcactgctgaccgctcccgcgctcggcctgcccgacctgacgaaaccattcgagcttttcgtggatgagaaacaaggatatgctaagggagtgctgactcagaagcttgggccgtggcgacgcccagtagcttatctcagcaagaaactggatcctgtggccgccggttggccgccatgtttgagaatggttgccgctatcgcagtcctcaccaaagacgccggtaaactgacaatggggcaacctctggtgatcctcgctccgcacgctgtggaagccttagtgaagcagccacctgataggtggttaagcaatgcgagaatgacccattaccaagcgttattgctggataccgatagagtgcaatttggccccgttgtcgctctcaatcccgcgactcttctgcccttaccagaagagggacttcagcataattgtttggacattctcgcagaggctcatggcactcggccagatctcaccgatcaaccccttcctgatgctgatcatacttggtatactgacggctcatccctgctgcaggaaggccaaagaaaagccggcgccgctgtcacaacagaaactgaagtgatttgggccaaggcactccctgcaggaactagcgcccaaagagccgagctcatcgcccttactcaagctctcaaaatggccgagggcaagaaacttaacgtgtacacagactccaggtacgccttcgccacagcacacattcacggcgagatctatcgccgaaggggatggctgacgagtgagggaaaggaaattaagaacaaggatgaaatactggcgctgctgaaggctctgtttctccctaagcggctgtccattattcactgccctggtcaccagaaagggcattccgctgaagccaggggcaataggatggcagatcaggctgcaaggaaagctgcaattaccgaaacgcccgatacgagcacacttcttatcgagaactcttccccttcaggcggtagcaagcggacagcagatggatccgagtttgaacctaggggcggcggaggcagctacccctatgatgtacctgattatgcttctggcggacccaagaagaagaggaaagtcggtggttctcctaagaaaaagagaaaggtcggatccggc

SEQ ID NO: 1754 - DNA, 4434 bp, synthetic construct
  source 1..4434: mol_type = other DNA; note mammalian_codon_optimized_tethered_system_MG3-6-3-8n-MG160- 4(H230R)-33AA_linker
atgaagaggaccgctgatggttccgaatttgaatctcctaagaagaaacgaaaggttatgtcaacggacatgaagaactatcgtatcggggtcgacgtgggtgatcgaagcgtaggcctcgcagcgattgaatttgacgatgacggactgcctatacagaaactcgcattagtcaccttccgtcacgatggtggtctggatcctactaagaacaagacccctatgagtcgcaaggagacgcggggaatagccaggagaaccatgcgaatgaacagagagcggaaaagacggctccgtaacctggacaatgttttagaaaacttgggctactcagtcccggaaggaccagaacctgagacatatgaagcctggacctctcgggctcttctggcatccattaagctcgcaagtgccgatgagctgaatgaacatttggttagagcggtcagacatatggctcgacacaggggatgggccaatccgtggtggtctttagatcagctcgaaaaggctagtcaggagccaagcgagacattcgagatcatcctggcacgcgctagggagctgttcggagaaaaggtgcccgctaaccctacattaggtatgctgggcgccttagcggctaacaatgaggtactgcttcgacccagggacgagaagaaacgaaagaccggctacgtgagaggtacacccttaatgttcgcgcaggtcaggcagggagatcagctcgcggagctccgtcgaatctgcgaagttcaagggatcgaagatcaatatgaagctctgagattaggggtgttcgatcacaagcacccttacgtccctaaggaacgcgtcggaaaagacccactgaatccgagcacgaaccggaccatccgggctagtttggagttccaggaatttagaatattagattccgttgctaacctgagggtgagaatcggctcccgagctaaacgggagcttaccgaggcagagtacgacgcggccgtcgaatttcttatggattacgccgacaaggagcagccttcctgggctgacgttgcagagaaaatcggcgtacctggtaacaggctggtggcacccgtgttagaggacgtgcagcagaaaactgctccctatgataggtcttccgcggcatttgaaaaggcaatgggaaagaagaccgaagccagacagtggtgggaaagcactgatgatgaccaactgcggagtctcctgattgctttcctggtcgacgccaccaatgataccgaggaagcagcggcagaagccggacttagtgagttatataaatcatggcccgccgaggagagggaagcactctctaatatcgacttcgaaaagggaagagtggcctactcacaggaaaccttgagcaagttgtccgaatacatgcacgaataccgagttggcttgcatgaggccagaaaggctgtctttggggtcgacgatacatggcgcccaccacttgataaactggaagagcctacaggacagcctgctgtcgaccgcgttcttacaatactcaggcggttcgtgctggactgcgagcgccagtggggtcggcccagagccatcaccgtcgagcatacaaggactggattgatgggaccaacgcagcggcagaaaattcttaacgaacagaagaagaatcgggctgacaatgagcgtatccgcgacgaacttcgggaaagcggggtagataacccatcacgggcggaagttcggcgtcatttgatagtgcaagaacaggagtgccagtgtctgtattgtgggacaatgatcaccactaccactagtgaactggacgccatagtgccgcgggccggtggcggctcaagtaggcgtgagaacttggccgccgtctgtcgcgcttgtaatgccaagaagaaaagggagttattttatgcatgggccgggccggtgaagtcccaggagactatcgagagggtgagacagcttaaagccttcaaagactccaagaaagccaagatgtttaagaatcagatccgacgattaaatcagaccgaagcagatgaaccgatagacgagcgttctcttgcatccacttcatacgccgcagtcgctgtcagggagcggttagaacaacattttaacgagggtctggcacttgatgataaatcccgagtggtactggacgtgtatgccggcgctgtgacaagagagagtcgccgggcgggcgggatcgacgagcggattttattaaggggcgaacgggataagaaccgattcgacgttaggcaccatgcagtcgacgctgcagtgatgacactgcttaataggtccgtggcactgaccctggagcaacgtagccagctgcggcgcgccttctatgaacagggactggacaagctggaccgcgaccaacttaagcctgaagaggactggagaaacttcatcggcctgagcctggcatcccaggagaaattcttggagtggaagaaagtgaccacagtgctcggagacttgctggctgaggcaatagaagatgacagcattgcggttgtatcaccactccgccttagaccccagaacggaagggtgcacaaggacaccatagccgctgtgaagaagcagacactcggttccgcctggagcgccgatgccgttaagagaatcgtggaccctgaaatttatcttgccatgaaagacgctctgggcaagagcaaggtgctcccagaagactctgcacgaaccctggaactgagcgatgggcgctacctggaagccgacgacgaagtcttgttcttccccaagaacgccgcatctattctgacacctcgcggggttgctgagattggtgggtcaatacaccacgcacggctctacagctggctgaccaagaagggagaactgaagatcgggatgcttagagtctacggggccgagttcccttggctgatgagggaaagtgggagccacgacgttctgaggatgccaattcaccccggcagtcagtctttcagagatatgcaagatacaactaggaaggcggtggagagcagcgaagccgtcgagttcgcatggatcacacagaatgacgagctcgaatttgagccggaggactatatcgcccacggcggtaaggacgaactgcggcagttcctcgagttcatgccagagtgccggtggagagtcgatggctttaagaagaattatcagatcagaatcagaccagccatgctgtcacgagaacagctgccatccgatatacagaggcggctggagtctaaaacactgaccgagaatgaaagcttgctgctcaaggctcttgacacgggactcgtggttgcgatcggcggacttctcccattaggcaccttgaaggtgatacggcgaaacaatcttggatttcccagatggcgcggcaatggaaatcttccgacatcttttgaggtacgcagctccgctctccgagccctgggagtagaaggttctggcggcagcagcggcggctcaagcggaagtgaaacacctggaacttccgaaagcgctacgcctgaatcttctggtggatcttctggcggatcttccgcatgcgttacccagaagtggacccatcgataccagttgaaacccggccgatgggtttttgcccccacagatgaggccaagaagtgcggtgctcacattaagcgcagcgtggcttccaggtggaaggccccaaacttctactatcacctcagaaatggcgggcacgttgcggccgtacggtcccacgaactgagccggtttttcttccgggcagatttggacgatttctttgggagagtgaaccggtctcgcgtgacccggtgccttaaaccttggttctcatacgccgaagcaagggagatggcctcagaatctgtcgtgaagcgacctggagagacagcctttgtgctgccgtatgggttcgtgcagagccctatcctcgcatccttggccctggacaagagtaaactgggtagcctgctgagatcactggacgggggccgcgatttcacggtgagcgtctatgtcgacgacatcattatctctggagacgacgaagctcaacttaaagaggtagcatcccgccttgagagagtggcgagtgaggccctgtttccactcagcagtggcaaaactcagggacccgcctctggagtgactgtttttaacatagaactgtcccatagaatgctcaggattaccgatgataggctcgcttcactgaggctcgactatcaggcgactgcatctgagaggtgtaaagctggcatcgtctcctacgtatacagtgtgaatccagatcaggtcgctcaagtgacacctaggggcggcggaggcagctacccctatgatgtacctgattatgcttctggcggacccaagaagaagaggaaagtcggtggttctcctaagaaaaagagaaaggtcggatccggc

SEQ ID NO: 1755 - RNA, 142 nt, synthetic construct
  source 1..142: mol_type = other RNA; note = hPDK1_MG3-6-3-8_pegRNA_PBS8
  modified_base 1..3: mod_base = OTHER; note = 2'O-methyl ribonucleotide
  modified_base 1..4: mod_base = OTHER; note = phosphorothioate linkage
  modified_base 140..142: mod_base = OTHER; note = 2'O-methyl ribonucleotide
  modified_base 139..142: mod_base = OTHER; note = phosphorothioate linkage
aggcaggggcatctgtctgtctgttgagaatcgaaagattcttaataaggcatccttccgatgctgacttctcaccgtccgttatccaataggagcgggcggtatggcctcttttgaagccgacagacagacagattttttt

SEQ ID NO: 1756 - RNA, 144 nt, synthetic construct
  source 1..144: mol_type = other RNA; note = hPDK1_MG3-6-3-8_pegRNA_PBS10
  modified_base 1..3: mod_base = OTHER; note = 2'O-methyl ribonucleotide
  modified_base 1..4: mod_base = OTHER; note = phosphorothioate linkage
  modified_base 142..144: mod_base = OTHER; note = 2'O-methyl ribonucleotide
  modified_base 141..144: mod_base = OTHER; note = phosphorothioate linkage
aggcaggggcatctgtctgtctgttgagaatcgaaagattcttaataaggcatccttccgatgctgacttctcaccgtccgttatccaataggagcgggcggtatggcctcttttgaagccgacagacagacagatgttttttt

SEQ ID NO: 1757 - RNA, 147 nt, synthetic construct
  source 1..147: mol_type = other RNA; note = hPDK1_MG3-6-3-8_pegRNA_PBS13
  modified_base 1..3: mod_base = OTHER; note = 2'O-methyl ribonucleotide
  modified_base 1..4: mod_base = OTHER; note = phosphorothioate linkage
  modified_base 145..147: mod_base = OTHER; note = 2'O-methyl ribonucleotide
  modified_base 144..147: mod_base = OTHER; note = phosphorothioate linkage
aggcaggggcatctgtctgtctgttgagaatcgaaagattcttaataaggcatccttccgatgctgacttctcaccgtccgttatccaataggagcgggcggtatggcctcttttgaagccgacagacagacagatgcccttttttt

SEQ ID NO: 1758 - RNA, 150 nt, synthetic construct
  source 1..150: mol_type = other RNA; note = hPDK1_MG3-6-3-8_pegRNA_PBS16
  modified_base 1..3: mod_base = OTHER; note = 2'O-methyl ribonucleotide
  modified_base 1..4: mod_base = OTHER; note = phosphorothioate linkage
  modified_base 148..150: mod_base = OTHER; note = 2'O-methyl ribonucleotide
  modified_base 147..150: mod_base = OTHER; note = phosphorothioate linkage
aggcaggggcatctgtctgtctgttgagaatcgaaagattcttaataaggcatccttccgatgctgacttctcaccgtccgttatccaataggagcgggcggtatggcctcttttgaagccgacagacagacagatgcccctgttttttt

SEQ ID NO: 1759 - RNA, 148 nt, synthetic construct
  source 1..148: mol_type = other RNA; note = A1AT_MG3-6-3-8_pegRNA_PBS8
  modified_base 1..3: mod_base = OTHER; note = 2'O-methyl ribonucleotide
  modified_base 1..4: mod_base = OTHER; note = phosphorothioate linkage
  modified_base 146..148: mod_base = OTHER; note = 2'O-methyl ribonucleotide
  modified_base 145..148: mod_base = OTHER; note = phosphorothioate linkage
tctctcccctccaggccgtgcagttgagaatcgaaagattcttaataaggcatccttccgatgctgacttctcaccgtccgttatccaataggagcgggcggtatgttgtcgattgtcaggacagctttatgcacggcctgttttttt

SEQ ID NO: 1760 - RNA, 150 nt, synthetic construct
  source 1..150: mol_type = other RNA; note = A1AT_MG3-6-3-8_pegRNA_PBS10
  modified_base 1..3: mod_base = OTHER; note = 2'O-methyl ribonucleotide
  modified_base 1..4: mod_base = OTHER; note = phosphorothioate linkage
  modified_base 148..150: mod_base = OTHER; note = 2'O-methyl ribonucleotide
  modified_base 147..150: mod_base = OTHER; note = phosphorothioate linkage
tctctcccctccaggccgtgcagttgagaatcgaaagattcttaataaggcatccttccgatgctgacttctcaccgtccgttatccaataggagcgggcggtatgttgtcgattgtcaggacagctttatgcacggcctggattttttt

SEQ ID NO: 1761 - RNA, 153 nt, synthetic construct
  source 1..153: mol_type = other RNA; note = A1AT_MG3-6-3-8_pegRNA_PBS13
  modified_base 1..3: mod_base = OTHER; note = 2'O-methyl ribonucleotide
  modified_base 1..4: mod_base = OTHER; note = phosphorothioate linkage
  modified_base 151..153: mod_base = OTHER; note = 2'O-methyl ribonucleotide
  modified_base 150..153: mod_base = OTHER; note = phosphorothioate linkage
tctctcccctccaggccgtgcagttgagaatcgaaagattcttaataaggcatccttccgatgctgacttctcaccgtccgttatccaataggagcgggcggtatgttgtcgattgtcaggacagctttatgcacggcctggagggttttttt

SEQ ID NO: 1762 - RNA, 156 nt, synthetic construct
  source 1..156: mol_type = other RNA; note = A1AT_MG3-6-3-8_pegRNA_PBS16
  modified_base 1..3: mod_base = OTHER; note = 2'O-methyl ribonucleotide
  modified_base 1..4: mod_base = OTHER; note = phosphorothioate linkage
  modified_base 154..156: mod_base = OTHER; note = 2'O-methyl ribonucleotide
  modified_base 153..156: mod_base = OTHER; note = phosphorothioate linkage
tctctcccctccaggccgtgcagttgagaatcgaaagattcttaataaggcatccttccgatgctgacttctcaccgtccgttatccaataggagcgggcggtatgttgtcgattgtcaggacagctttatgcacggcctggaggggagttttttt

SEQ ID NO: 1763 - RNA, 141 nt, synthetic construct
  source 1..141: mol_type = other RNA; note = G6PC1_Q347*_MG3-6-3-8_pegRNA_PBS8
  modified_base 1..3: mod_base = OTHER; note = 2'O-methyl ribonucleotide
  modified_base 1..4: mod_base = OTHER; note = phosphorothioate linkage
  modified_base 139..141: mod_base = OTHER; note = 2'O-methyl ribonucleotide
  modified_base 138..141: mod_base = OTHER; note = phosphorothioate linkage
tgtcatcccctactgcctcgccgttgagaatcgaaagattcttaataaggcatccttccgatgctgacttctcaccgtccgttatccaataggagcgggcggtatgggctggcccacgactcaggcgaggcagtttttttt

SEQ ID NO: 1764 - RNA, 143 nt, synthetic construct
  source 1..143: mol_type = other RNA; note = G6PC1_Q347*_MG3-6-3-8_pegRNA_PBS10
  modified_base 1..3: mod_base = OTHER; note = 2'O-methyl ribonucleotide
  modified_base 1..4: mod_base = OTHER; note = phosphorothioate linkage
  modified_base 141..143: mod_base = OTHER; note = 2'O-methyl ribonucleotide
  modified_base 140..143: mod_base = OTHER; note = phosphorothioate linkage
tgtcatcccctactgcctcgccgttgagaatcgaaagattcttaataaggcatccttccgatgctgacttctcaccgtccgttatccaataggagcgggcggtatgggctggcccacgactcaggcgaggcagtagttttttt

SEQ ID NO: 1765 - RNA, 146 nt, synthetic construct
  source 1..146: mol_type = other RNA; note = G6PC1_Q347*_MG3-6-3-8_pegRNA_PBS13
  modified_base 1..3: mod_base = OTHER; note = 2'O-methyl ribonucleotide
  modified_base 1..4: mod_base = OTHER; note = phosphorothioate linkage
  modified_base 144..146: mod_base = OTHER; note = 2'O-methyl ribonucleotide
  modified_base 143..146: mod_base = OTHER; note = phosphorothioate linkage
tgtcatcccctactgcctcgccgttgagaatcgaaagattcttaataaggcatccttccgatgctgacttctcaccgtccgttatccaataggagcgggcggtatgggctggcccacgactcaggcgaggcagtaggggttttttt

SEQ ID NO: 1766 - RNA, 149 nt, synthetic construct
  source 1..149: mol_type = other RNA; note = G6PC1_Q347*_MG3-6-3-8_pegRNA_PBS16
  modified_base 1..3: mod_base = OTHER; note = 2'O-methyl ribonucleotide
  modified_base 1..4: mod_base = OTHER; note = phosphorothioate linkage
  modified_base 147..149: mod_base = OTHER; note = 2'O-methyl ribonucleotide
  modified_base 146..149: mod_base = OTHER; note = phosphorothioate linkage
tgtcatcccctactgcctcgccgttgagaatcgaaagattcttaataaggcatccttccgatgctgacttctcaccgtccgttatccaataggagcgggcggtatgggctggcccacgactcaggcgaggcagtaggggatgttttttt

SEQ ID NO: 1767 - RNA, 149 nt, synthetic construct
  source 1..149: mol_type = other RNA; note = G6PC1_R83C_MG3-6-3-8_pegRNA_PBS8
  modified_base 1..3: mod_base = OTHER; note = 2'O-methyl ribonucleotide
  modified_base 1..4: mod_base = OTHER; note = phosphorothioate linkage
  modified_base 147..149: mod_base = OTHER; note = 2'O-methyl ribonucleotide
  modified_base 146..149: mod_base = OTHER; note = phosphorothioate linkage
agaaacttgttctgtttttccagttgagaatcgaaagattcttaataaggcatccttccgatgctgacttctcaccgtccgttatccaataggagcgggcggtatgtgggcactgcccaaagaggatcatatggaaaaacagttttttt

SEQ ID NO: 1768 - RNA, 151 nt, synthetic construct
  source 1..151: mol_type = other RNA; note = G6PC1_R83C_MG3-6-3-8_pegRNA_PBS10
  modified_base 1..3: mod_base = OTHER; note = 2'O-methyl ribonucleotide
  modified_base 1..4: mod_base = OTHER; note = phosphorothioate linkage
  modified_base 149..151: mod_base = OTHER; note = 2'O-methyl ribonucleotide
  modified_base 148..151: mod_base = OTHER; note = phosphorothioate linkage
agaaacttgttctgtttttccagttgagaatcgaaagattcttaataaggcatccttccgatgctgacttctcaccgtccgttatccaataggagcgggcggtatgtgggcactgcccaaagaggatcatatggaaaaacagaattttttt

SEQ ID NO: 1769 - RNA, 154 nt, synthetic construct
  source 1..154: mol_type = other RNA; note = G6PC1_R83C_MG3-6-3-8_pegRNA_PBS13
  modified_base 1..3: mod_base = OTHER; note = 2'O-methyl ribonucleotide
  modified_base 1..4: mod_base = OTHER; note = phosphorothioate linkage
  modified_base 152..154: mod_base = OTHER; note = 2'O-methyl ribonucleotide
  modified_base 151..154: mod_base = OTHER; note = phosphorothioate linkage
agaaacttgttctgtttttccagttgagaatcgaaagattcttaataaggcatccttccgatgctgacttctcaccgtccgttatccaataggagcgggcggtatgtgggcactgcccaaagaggatcatatggaaaaacagaacaattttttt

SEQ ID NO: 1770 - RNA, 157 nt, synthetic construct
  source 1..157: mol_type = other RNA; note = G6PC1_R83C_MG3-6-3-8_pegRNA_PBS16
  modified_base 1..3: mod_base = OTHER; note = 2'O-methyl ribonucleotide
  modified_base 1..4: mod_base = OTHER; note = phosphorothioate linkage
  modified_base 154..156: mod_base = OTHER; note = 2'O-methyl ribonucleotide
  modified_base 153..156: mod_base = OTHER; note = phosphorothioate linkage
agaaacttgttctgtttttccagttgagaatcgaaagattcttaataaggcatccttccgatgctgacttctcaccgtccgttatccaataggagcgggcggtatgtgggcactgcccaaagaggatcatatggaaaaacagaacaagttttttttt

SEQ ID NO: 1771 - RNA, 153 nt, synthetic construct
  source 1..153: mol_type = other RNA; note = PAH_R408W_MG3-6-3-8_pegRNA_PBS8
  modified_base 1..3: mod_base = OTHER; note = 2'O-methyl ribonucleotide
  modified_base 1..4: mod_base = OTHER; note = phosphorothioate linkage
  modified_base 151..153: mod_base = OTHER; note = 2'O-methyl ribonucleotide
  modified_base 150..153: mod_base = OTHER; note = phosphorothioate linkage
aagacctcaatcctttgggtgtgttgagaatcgaaagattcttaataaggcatccttccgatgctgacttctcaccgtccgttatccaataggagcgggcggtatgttggcccttctccgttcgctaccagccatacacccaaaggttttttt

SEQ ID NO: 1772 - RNA, 155 nt, synthetic construct
  source 1..155: mol_type = other RNA; note = PAH_R408W_MG3-6-3-8_pegRNA_PBS10
  modified_base 1..3: mod_base = OTHER; note = 2'O-methyl ribonucleotide
  modified_base 1..4: mod_base = OTHER; note = phosphorothioate linkage
  modified_base 153..155: mod_base = OTHER; note = 2'O-methyl ribonucleotide
  modified_base 152..155: mod_base = OTHER; note = phosphorothioate linkage
aagacctcaatcctttgggtgtgttgagaatcgaaagattcttaataaggcatccttccgatgctgacttctcaccgtccgttatccaataggagcgggcggtatgttggcccttctccgttcgctaccagccatacacccaaaggatttttttt

SEQ ID NO: 1773 - RNA, 158 nt, synthetic construct
  source 1..158: mol_type = other RNA; note = PAH_R408W_MG3-6-3-8_pegRNA_PBS13
  modified_base 1..3: mod_base = OTHER; note = 2'O-methyl ribonucleotide
  modified_base 1..4: mod_base = OTHER; note = phosphorothioate linkage
  modified_base 156..158: mod_base = OTHER; note = 2'O-methyl ribonucleotide
  modified_base 155..158: mod_base = OTHER; note = phosphorothioate linkage
aagacctcaatcctttgggtgtgttgagaatcgaaagattcttaataaggcatccttccgatgctgacttctcaccgtccgttatccaataggagcgggcggtatgttggcccttctccgttcgctaccagccatacacccaaaggattgattttttt

SEQ ID NO: 1774 - RNA, 161 nt, synthetic construct
  source 1..161: mol_type = other RNA; note = PAH_R408W_MG3-6-3-8_pegRNA_PBS16
  modified_base 1..3: mod_base = OTHER; note = 2'O-methyl ribonucleotide
  modified_base 1..4: mod_base = OTHER; note = phosphorothioate linkage
  modified_base 159..161: mod_base = OTHER; note = 2'O-methyl ribonucleotide
  modified_base 158..161: mod_base = OTHER; note = phosphorothioate linkage
aagacctcaatcctttgggtgtgttgagaatcgaaagattcttaataaggcatccttccgatgctgacttctcaccgtccgttatccaataggagcgggcggtatgttggcccttctccgttcgctaccagccatacacccaaaggattgaggtttttttt

SEQ ID NO: 1775 - skipped

SEQ ID NO: 1776 - DNA, 4434 bp, synthetic construct
  source 1..4434: mol_type = other DNA; note mammalian_codon_optimized_tethered_system_MG160-4_H230R_MG3 -6-3-8n
atgaagaggaccgctgatggttccgaatttgaatctcctaagaagaaacgaaaggttgttacccagaagtggacccatcgataccagttgaaacccggccgatgggtttttgcccccacagatgaggccaagaagtgcggtgctcacattaagcgcagcgtggcttccaggtggaaggccccaaacttctactatcacctcagaaatggcgggcacgttgcggccgtacggtcccacgaactgagccggtttttcttccgggcagatttggacgatttctttgggagagtgaaccggtctcgcgtgacccggtgccttaaaccttggttctcatacgccgaagcaagggagatggcctcagaatctgtcgtgaagcgacctggagagacagcctttgtgctgccgtatgggttcgtgcagagccctatcctcgcatccttggccctggacaagagtaaactgggtagcctgctgagatcactggacgggggccgcgatttcacggtgagcgtctatgtcgacgacatcattatctctggagacgacgaagctcaacttaaagaggtagcatcccgccttgagagagtggcgagtgaggccctgtttccactcagcagtggcaaaactcagggacccgcctctggagtgactgtttttaacatagaactgtcccatagaatgctcaggattaccgatgataggctcgcttcactgaggctcgactatcaggcgactgcatctgagaggtgtaaagctggcatcgtctcctacgtatacagtgtgaatccagatcaggtcgctcaagtgacatctggcggcagcagcggcggctcaagcggaagtgaaacacctggaacttccgaaagcgctacgcctgaatcttctggtggatcttctggcggatcttccgcatgcatgtcaacggacatgaagaactatcgtatcggggtcgacgtgggtgatcgaagcgtaggcctcgcagcgattgaatttgacgatgacggactgcctatacagaaactcgcattagtcaccttccgtcacgatggtggtctggatcctactaagaacaagacccctatgagtcgcaaggagacgcggggaatagccaggagaaccatgcgaatgaacagagagcggaaaagacggctccgtaacctggacaatgttttagaaaacttgggctactcagtcccggaaggaccagaacctgagacatatgaagcctggacctctcgggctcttctggcatccattaagctcgcaagtgccgatgagctgaatgaacatttggttagagcggtcagacatatggctcgacacaggggatgggccaatccgtggtggtctttagatcagctcgaaaaggctagtcaggagccaagcgagacattcgagatcatcctggcacgcgctagggagctgttcggagaaaaggtgcccgctaaccctacattaggtatgctgggcgccttagcggctaacaatgaggtactgcttcgacccagggacgagaagaaacgaaagaccggctacgtgagaggtacacccttaatgttcgcgcaggtcaggcagggagatcagctcgcggagctccgtcgaatctgcgaagttcaagggatcgaagatcaatatgaagctctgagattaggggtgttcgatcacaagcacccttacgtccctaaggaacgcgtcggaaaagacccactgaatccgagcacgaaccggaccatccgggctagtttggagttccaggaatttagaatattagattccgttgctaacctgagggtgagaatcggctcccgagctaaacgggagcttaccgaggcagagtacgacgcggccgtcgaatttcttatggattacgccgacaaggagcagccttcctgggctgacgttgcagagaaaatcggcgtacctggtaacaggctggtggcacccgtgttagaggacgtgcagcagaaaactgctccctatgataggtcttccgcggcatttgaaaaggcaatgggaaagaagaccgaagccagacagtggtgggaaagcactgatgatgaccaactgcggagtctcctgattgctttcctggtcgacgccaccaatgataccgaggaagcagcggcagaagccggacttagtgagttatataaatcatggcccgccgaggagagggaagcactctctaatatcgacttcgaaaagggaagagtggcctactcacaggaaaccttgagcaagttgtccgaatacatgcacgaataccgagttggcttgcatgaggccagaaaggctgtctttggggtcgacgatacatggcgcccaccacttgataaactggaagagcctacaggacagcctgctgtcgaccgcgttcttacaatactcaggcggttcgtgctggactgcgagcgccagtggggtcggcccagagccatcaccgtcgagcatacaaggactggattgatgggaccaacgcagcggcagaaaattcttaacgaacagaagaagaatcgggctgacaatgagcgtatccgcgacgaacttcgggaaagcggggtagataacccatcacgggcggaagttcggcgtcatttgatagtgcaagaacaggagtgccagtgtctgtattgtgggacaatgatcaccactaccactagtgaactggacgccatagtgccgcgggccggtggcggctcaagtaggcgtgagaacttggccgccgtctgtcgcgcttgtaatgccaagaagaaaagggagttattttatgcatgggccgggccggtgaagtcccaggagactatcgagagggtgagacagcttaaagccttcaaagactccaagaaagccaagatgtttaagaatcagatccgacgattaaatcagaccgaagcagatgaaccgatagacgagcgttctcttgcatccacttcatacgccgcagtcgctgtcagggagcggttagaacaacattttaacgagggtctggcacttgatgataaatcccgagtggtactggacgtgtatgccggcgctgtgacaagagagagtcgccgggcgggcgggatcgacgagcggattttattaaggggcgaacgggataagaaccgattcgacgttaggcaccatgcagtcgacgctgcagtgatgacactgcttaataggtccgtggcactgaccctggagcaacgtagccagctgcggcgcgccttctatgaacagggactggacaagctggaccgcgaccaacttaagcctgaagaggactggagaaacttcatcggcctgagcctggcatcccaggagaaattcttggagtggaagaaagtgaccacagtgctcggagacttgctggctgaggcaatagaagatgacagcattgcggttgtatcaccactccgccttagaccccagaacggaagggtgcacaaggacaccatagccgctgtgaagaagcagacactcggttccgcctggagcgccgatgccgttaagagaatcgtggaccctgaaatttatcttgccatgaaagacgctctgggcaagagcaaggtgctcccagaagactctgcacgaaccctggaactgagcgatgggcgctacctggaagccgacgacgaagtcttgttcttccccaagaacgccgcatctattctgacacctcgcggggttgctgagattggtgggtcaatacaccacgcacggctctacagctggctgaccaagaagggagaactgaagatcgggatgcttagagtctacggggccgagttcccttggctgatgagggaaagtgggagccacgacgttctgaggatgccaattcaccccggcagtcagtctttcagagatatgcaagatacaactaggaaggcggtggagagcagcgaagccgtcgagttcgcatggatcacacagaatgacgagctcgaatttgagccggaggactatatcgcccacggcggtaaggacgaactgcggcagttcctcgagttcatgccagagtgccggtggagagtcgatggctttaagaagaattatcagatcagaatcagaccagccatgctgtcacgagaacagctgccatccgatatacagaggcggctggagtctaaaacactgaccgagaatgaaagcttgctgctcaaggctcttgacacgggactcgtggttgcgatcggcggacttctcccattaggcaccttgaaggtgatacggcgaaacaatcttggatttcccagatggcgcggcaatggaaatcttccgacatcttttgaggtacgcagctccgctctccgagccctgggagtagaaggtcctaggggcggcggaggcagctacccctatgatgtacctgattatgcttctggcggacccaagaagaagaggaaagtcggtggttctcctaagaaaaagagaaaggtcggatccggc

SEQ ID NO: 1777 - DNA, 4434 bp, synthetic construct
  source 1..4434: mol_type = other DNA; note mammalian_codon_optimized_tethered_system_MG160-4_H230R_MG3 -6n
atgaagaggaccgctgatggttccgaatttgaatctcctaagaagaaacgaaaggttgttacccagaagtggacccatcgataccagttgaaacccggccgatgggtttttgcccccacagatgaggccaagaagtgcggtgctcacattaagcgcagcgtggcttccaggtggaaggccccaaacttctactatcacctcagaaatggcgggcacgttgcggccgtacggtcccacgaactgagccggtttttcttccgggcagatttggacgatttctttgggagagtgaaccggtctcgcgtgacccggtgccttaaaccttggttctcatacgccgaagcaagggagatggcctcagaatctgtcgtgaagcgacctggagagacagcctttgtgctgccgtatgggttcgtgcagagccctatcctcgcatccttggccctggacaagagtaaactgggtagcctgctgagatcactggacgggggccgcgatttcacggtgagcgtctatgtcgacgacatcattatctctggagacgacgaagctcaacttaaagaggtagcatcccgccttgagagagtggcgagtgaggccctgtttccactcagcagtggcaaaactcagggacccgcctctggagtgactgtttttaacatagaactgtcccatagaatgctcaggattaccgatgataggctcgcttcactgaggctcgactatcaggcgactgcatctgagaggtgtaaagctggcatcgtctcctacgtatacagtgtgaatccagatcaggtcgctcaagtgacatctggcggcagcagcggcggctcaagcggaagtgaaacacctggaacttccgaaagcgctacgcctgaatcttctggtggatcttctggcggatcttccgcatgcatgtcaacggacatgaagaactatcgtatcggggtcgacgtgggtgatcgaagcgtaggcctcgcagcgattgaatttgacgatgacggactgcctatacagaaactcgcattagtcaccttccgtcacgatggtggtctggatcctactaagaacaagacccctatgagtcgcaaggagacgcggggaatagccaggagaaccatgcgaatgaacagagagcggaaaagacggctccgtaacctggacaatgttttagaaaacttgggctactcagtcccggaaggaccagaacctgagacatatgaagcctggacctctcgggctcttctggcatccattaagctcgcaagtgccgatgagctgaatgaacatttggttagagcggtcagacatatggctcgacacaggggatgggccaatccgtggtggtctttagatcagctcgaaaaggctagtcaggagccaagcgagacattcgagatcatcctggcacgcgctagggagctgttcggagaaaaggtgcccgctaaccctacattaggtatgctgggcgccttagcggctaacaatgaggtactgcttcgacccagggacgagaagaaacgaaagaccggctacgtgagaggtacacccttaatgttcgcgcaggtcaggcagggagatcagctcgcggagctccgtcgaatctgcgaagttcaagggatcgaagatcaatatgaagctctgagattaggggtgttcgatcacaagcacccttacgtccctaaggaacgcgtcggaaaagacccactgaatccgagcacgaaccggaccatccgggctagtttggagttccaggaatttagaatattagattccgttgctaacctgagggtgagaatcggctcccgagctaaacgggagcttaccgaggcagagtacgacgcggccgtcgaatttcttatggattacgccgacaaggagcagccttcctgggctgacgttgcagagaaaatcggcgtacctggtaacaggctggtggcacccgtgttagaggacgtgcagcagaaaactgctccctatgataggtcttccgcggcatttgaaaaggcaatgggaaagaagaccgaagccagacagtggtgggaaagcactgatgatgaccaactgcggagtctcctgattgctttcctggtcgacgccaccaatgataccgaggaagcagcggcagaagccggacttagtgagttatataaatcatggcccgccgaggagagggaagcactctctaatatcgacttcgaaaagggaagagtggcctactcacaggaaaccttgagcaagttgtccgaatacatgcacgaataccgagttggcttgcatgaggccagaaaggctgtctttggggtcgacgatacatggcgcccaccacttgataaactggaagagcctacaggacagcctgctgtcgaccgcgttcttacaatactcaggcggttcgtgctggactgcgagcgccagtggggtcggcccagagccatcaccgtcgagcatacaaggactggattgatgggaccaacgcagcggcagaaaattcttaacgaacagaagaagaatcgggctgacaatgagcgtatccgcgacgaacttcgggaaagcggggtagataacccatcacgggcggaagttcggcgtcatttgatagtgcaagaacaggagtgccagtgtctgtattgtgggacaatgatcaccactaccactagtgaactggacgccatagtgccgcgggccggtggcggctcaagtaggcgtgagaacttggccgccgtctgtcgcgcttgtaatgccaagaagaaaagggagttattttatgcatgggccgggccggtgaagtcccaggagactatcgagagggtgagacagcttaaagccttcaaagactccaagaaagccaagatgtttaagaatcagatccgacgattaaatcagaccgaagcagatgaaccgatagacgagcgttctcttgcatccacttcatacgccgcagtcgctgtcagggagcggttagaacaacattttaacgagggtctggcacttgatgataaatcccgagtggtactggacgtgtatgccggcgctgtgacaagagagagtcgccgggcgggcgggatcgacgagcggattttattaaggggcgaacgggataagaaccgattcgacgttaggcaccatgcagtcgacgctgcagtgatgacactgcttaataggtccgtggcactgaccctggagcaacgtagccagctgcggcgcacattctatgaacagggactggacaagctggaccgcaatcaacttaagcctgaagaggactggagagatttcaccggcctggcccctgcatcccaggagaaattcttggagtggcggaaagctgccacaattctcggagacttgctggctgaggcaatagaagatgacagcattgcggttgtatcaccactccgccttagaccccagaacggatctgtgcaccttgaaaccatatccgctgtgaagaagcagacactcggttccgattggccagccgatgccgttaagagaatcgtggaccctgaaatttatcttgccatgaaagacgctctgggcaagctgaaggagctcccagaagactctgcacgaagcctggaactgccagatgggcgcttcgttgaagccgacgacgaagtcttgttcttccccgagaacgccgcatctattctgacacctcgcggggttgctgagattggtgggtcaatacaccacgcacggctctacggctggctgaccaagaagggagaactgaaggtagggatgcttagagtctacggggccgagttcccttggctgatgagggaaagtgggagccgaaacgttctgtccatgccaattcaccggggcagtcagtctttcagagatatgcaagatacaactaggaaggcggtggagagcggcgaagccgtcgagttcgcatggatcacacagaatgacgagctcgaatttgacccggatgactatatcgcccacggcggtaaggacgaactgcggcagttcctcgggttcatgccagagtgccggtggagagtcgatggctttaagaagaattatcagatcagaatcagaccagccatgctgtcacgagaacagctgccatccgatatacagaggcggctggagtctaaaacactgaccaagaatgaaagcttgctgctcaaggctcttgacacgggactcgtggttgcgatcggcggacttctcccattagaaaccttgaaggtgatacggcgaaacaatcttggatttcccagatggcgcggcaatggaaatcttccgacatcttttgaggtacgcagctccgctctccgagccctgggagtagaaggtcctaggggcggcggaggcagctacccctatgatgtacctgattatgcttctggcggacccaagaagaagaggaaagtcggtggttctcctaagaaaaagagaaaggtcggatccggc

SEQ ID NO: 1778 - DNA, 5754 bp, synthetic construct
  source 1..5754: mol_type = other DNA; note mammalian_codon_optimized_tethered_system_MG3-6n_MMLV2
atgaagaggaccgctgatggttccgaatttgaatctcctaagaagaaacgaaaggttatgtcaacggacatgaagaactatcgtatcggggtcgacgtgggtgatcgaagcgtaggcctcgcagcgattgaatttgacgatgacggactgcctatacagaaactcgcattagtcaccttccgtcacgatggtggtctggatcctactaagaacaagacccctatgagtcgcaaggagacgcggggaatagccaggagaaccatgcgaatgaacagagagcggaaaagacggctccgtaacctggacaatgttttagaaaacttgggctactcagtcccggaaggaccagaacctgagacatatgaagcctggacctctcgggctcttctggcatccattaagctcgcaagtgccgatgagctgaatgaacatttggttagagcggtcagacatatggctcgacacaggggatgggccaatccgtggtggtctttagatcagctcgaaaaggctagtcaggagccaagcgagacattcgagatcatcctggcacgcgctagggagctgttcggagaaaaggtgcccgctaaccctacattaggtatgctgggcgccttagcggctaacaatgaggtactgcttcgacccagggacgagaagaaacgaaagaccggctacgtgagaggtacacccttaatgttcgcgcaggtcaggcagggagatcagctcgcggagctccgtcgaatctgcgaagttcaagggatcgaagatcaatatgaagctctgagattaggggtgttcgatcacaagcacccttacgtccctaaggaacgcgtcggaaaagacccactgaatccgagcacgaaccggaccatccgggctagtttggagttccaggaatttagaatattagattccgttgctaacctgagggtgagaatcggctcccgagctaaacgggagcttaccgaggcagagtacgacgcggccgtcgaatttcttatggattacgccgacaaggagcagccttcctgggctgacgttgcagagaaaatcggcgtacctggtaacaggctggtggcacccgtgttagaggacgtgcagcagaaaactgctccctatgataggtcttccgcggcatttgaaaaggcaatgggaaagaagaccgaagccagacagtggtgggaaagcactgatgatgaccaactgcggagtctcctgattgctttcctggtcgacgccaccaatgataccgaggaagcagcggcagaagccggacttagtgagttatataaatcatggcccgccgaggagagggaagcactctctaatatcgacttcgaaaagggaagagtggcctactcacaggaaaccttgagcaagttgtccgaatacatgcacgaataccgagttggcttgcatgaggccagaaaggctgtctttggggtcgacgatacatggcgcccaccacttgataaactggaagagcctacaggacagcctgctgtcgaccgcgttcttacaatactcaggcggttcgtgctggactgcgagcgccagtggggtcggcccagagccatcaccgtcgagcatacaaggactggattgatgggaccaacgcagcggcagaaaattcttaacgaacagaagaagaatcgggctgacaatgagcgtatccgcgacgaacttcgggaaagcggggtagataacccatcacgggcggaagttcggcgtcatttgatagtgcaagaacaggagtgccagtgtctgtattgtgggacaatgatcaccactaccactagtgaactggacgccatagtgccgcgggccggtggcggctcaagtaggcgtgagaacttggccgccgtctgtcgcgcttgtaatgccaagaagaaaagggagttattttatgcatgggccgggccggtgaagtcccaggagactatcgagagggtgagacagcttaaagccttcaaagactccaagaaagccaagatgtttaagaatcagatccgacgattaaatcagaccgaagcagatgaaccgatagacgagcgttctcttgcatccacttcatacgccgcagtcgctgtcagggagcggttagaacaacattttaacgagggtctggcacttgatgataaatcccgagtggtactggacgtgtatgccggcgctgtgacaagagagagtcgccgggcgggcgggatcgacgagcggattttattaaggggcgaacgggataagaaccgattcgacgttaggcaccatgcagtcgacgctgcagtgatgacactgcttaataggtccgtggcactgaccctggagcaacgtagccagctgcggcgcacattctatgaacagggactggacaagctggaccgcaatcaacttaagcctgaagaggactggagagatttcaccggcctggcccctgcatcccaggagaaattcttggagtggcggaaagctgccacaattctcggagacttgctggctgaggcaatagaagatgacagcattgcggttgtatcaccactccgccttagaccccagaacggatctgtgcaccttgaaaccatatccgctgtgaagaagcagacactcggttccgattggccagccgatgccgttaagagaatcgtggaccctgaaatttatcttgccatgaaagacgctctgggcaagctgaaggagctcccagaagactctgcacgaagcctggaactgccagatgggcgcttcgttgaagccgacgacgaagtcttgttcttccccgagaacgccgcatctattctgacacctcgcggggttgctgagattggtgggtcaatacaccacgcacggctctacggctggctgaccaagaagggagaactgaaggtagggatgcttagagtctacggggccgagttcccttggctgatgagggaaagtgggagccgaaacgttctgtccatgccaattcaccggggcagtcagtctttcagagatatgcaagatacaactaggaaggcggtggagagcggcgaagccgtcgagttcgcatggatcacacagaatgacgagctcgaatttgacccggatgactatatcgcccacggcggtaaggacgaactgcggcagttcctcgggttcatgccagagtgccggtggagagtcgatggctttaagaagaattatcagatcagaatcagaccagccatgctgtcacgagaacagctgccatccgatatacagaggcggctggagtctaaaacactgaccaagaatgaaagcttgctgctcaaggctcttgacacgggactcgtggttgcgatcggcggacttctcccattagaaaccttgaaggtgatacggcgaaacaatcttggatttcccagatggcgcggcaatggaaatcttccgacatcttttgaggtacgcagctccgctctccgagccctgggagtagaaggttctggcggcagcagcggcggctcaagcggaagtgaaacacctggaacttccgaaagcgctacgcctgaatcttctggtggatcttctggcggatcttccgcatgcactctgaacatcgaggacgaatacaggctccacgaaacttctaaggaacctgacgtgtccttgggatcaacttggttgtccgacttcccccaagcttgggccgagacaggcggaatgggtttggccgtgagacaggccccactcataatcccacttaaggcgacatccactccggtcagtatcaagcagtatccaatgtcccaggaagcacgcttaggaattaaaccacatattcaacgactcctggatcaaggtattctcgtcccatgtcaaagcccttggaatacccctcttctgcctgtgaagaagcccggcacaaacgactaccggcccgtgcaagacctcagggaagtgaataaacgagtcgaggatatacatccgactgtcccgaatccctataatctgctgtcaggtctgccaccaagtcatcaatggtatacagtactggacctgaaagacgcgttcttttgtttgcgactgcatcctacgtctcaaccgctgtttgcattcgaatggcgggaccccgaaatggggatttctgggcagctgacatggactcgtcttcctcaagggtttaagaactcccctacacttttcaacgaagccctgcatcgggatttagctgattttagaatccaacatcctgatctgattctcctgcaatatgttgacgatctgctcctcgctgcaaccagtgaacttgattgtcagcagggaacgagagctttactccagactctgggcaatcttggttaccgtgcttcagctaagaaggctcagatatgtcaaaagcaagtgaaataccttggttacctgttgaaggaagggcaacgctggttaaccgaagctcgcaaggaaacagtaatgggccaacccacacccaaaacaccccgccagctgagagaatttctcggtaaggctggattttgcagactgttcattcccggtttcgccgagatggccgcacctctttatccactgacgaagcccggtaccctcttcaactggggacccgatcagcagaaagcttaccaggagattaaacaggcactgctgaccgctcccgcgctcggcctgcccgacctgacgaaaccattcgagcttttcgtggatgagaaacaaggatatgctaagggagtgctgactcagaagcttgggccgtggcgacgcccagtagcttatctcagcaagaaactggatcctgtggccgccggttggccgccatgtttgagaatggttgccgctatcgcagtcctcaccaaagacgccggtaaactgacaatggggcaacctctggtgatcctcgctccgcacgctgtggaagccttagtgaagcagccacctgataggtggttaagcaatgcgagaatgacccattaccaagcgttattgctggataccgatagagtgcaatttggccccgttgtcgctctcaatcccgcgactcttctgcccttaccagaagagggacttcagcataattgtttggacattctcgcagaggctcatggcactcggccagatctcaccgatcaaccccttcctgatgctgatcatacttggtatactgacggctcatccctgctgcaggaaggccaaagaaaagccggcgccgctgtcacaacagaaactgaagtgatttgggccaaggcactccctgcaggaactagcgcccaaagagccgagctcatcgcccttactcaagctctcaaaatggccgagggcaagaaacttaacgtgtacacagactccaggtacgccttcgccacagcacacattcacggcgagatctatcgccgaaggggatggctgacgagtgagggaaaggaaattaagaacaaggatgaaatactggcgctgctgaaggctctgtttctccctaagcggctgtccattattcactgccctggtcaccagaaagggcattccgctgaagccaggggcaataggatggcagatcaggctgcaaggaaagctgcaattaccgaaacgcccgatacgagcacacttcttatcgagaactcttccccttcaggcggtagcaagcggacagcagatggatccgagtttgaacctaggggcggcggaggcagctacccctatgatgtacctgattatgcttctggcggacccaagaagaagaggaaagtcggtggttctcctaagaaaaagagaaaggtcggatccggc

SEQ ID NO: 1779 - DNA, 1939 bp, synthetic construct
  source 1..1939: mol_type = other DNA; note engineered_mammalian_codon_optimized_target_HYGRO_STOP_BFP_ cell_line_target
gtttagtgaaccgtcagatccgctagcgctaccggtcgccaccatgaagaaacccgagttgacagctacctcagttgaaaagttccttattgagaaatttgattctgtatctgatcttatgcaattgtctgaaggtgaggagagcagagcatttagttttgacgtcggcggtcgcgggtacgtgcttagggtgaacagttgtgcagacggcttttataaggacagatacgtgtaccgacatttcgcttctgctgcccttcctatccccgaggtcctggatatcggcgaatttagtgaatctttgacttactgtatttctagaagggctcaaggcgtgactctccaggatctcccagagactgagctccctgccgtccttcaacccgtagctgaagcaatggacgctattgcagctgcggacctctcacaaaccagtggctttggaccttttggccctcagggtattggccagtatacgacgtggcgcgactttatctgtgcaatcgccgaccctcacgtctaccattggcagacagtcatggatgatacagtgtcagcaagcgtggctcaagccctggacgaactcatgctgtgggcggaagattgtccggaagttcgtcatctggtacatgccgactttggtagcaataacgtgttgacagataacggacggattactgccgttatagattggtcagaagctatgtttggcgacagccagtatgaagttgcaaatattttcttttggcgaccatggctcgcatgtatggaacaacaaactcgttattttgaaaggcgtcacccagaactggctggctccccaagactgagggcttacatgctgcgaatcggcttagatcagctgtaccaatcactcgtggatggtaactttgacgacgccgcctgggcccaagggagatgtgatgccattgtgcggtcaggggcaggcacggtgggcagaactcagattgcaaggcgatccgcagctgtgtggacagacgggtgcgttgaggtgctggcagactctggcaatagacgaccttctacccgacccagagccaaagaggccagtaatctcggacagagtcttggggatccaccggagcttaagaagggcaaaggtcaggccgggtcaggttctggtaaaggggaagaggacaacatggccataatcaaggagttcagcgagctgattaaggagaacatgcacatgaagctgtacatggagggcaccgtggacaaccatcacttcaagtgcacatccgagggcgaaggcaagccctacgagggcacccagaccatgagaatcaaggtggtcgagggcggccctctccccttcgccttcgacatcctggctactagcttcctctacggcagcaagaccttcatcaaccacacccagggcatccccgacttcttcaagcagtccttccctgagggcttcacatgggagagagtcaccacatacgaagacgggggcgtgctgaccgctacccaggacaccagcctccaggacggctgcctcatctacaacgtcaagatcagaggggtgaacttcacatccaacggccctgtgatgcagaagaaaacactcggctgggaggccttcaccgagacgctgtaccccgctgacggcggcctggaaggcagaaacgacatggccctgaagctcgtgggcgggagccatctgatcgcaaacatcaagaccacatatagatccaagaaacccgctaagaacctcaagatgcctggcgtctactatgtggactacagactggaaagaatcaaggaggccaacaacgagacctacgtcgagcagcacgaggtggcagtggccagatactgcgacctccctagcaaactggggcacaagcttaattaatccggactcagatctcgagctcaagcttcgaattctcgacctcgagacaaatggcag

SEQ ID NO: 1780 - DNA, 4434 bp, synthetic construct
  source 1..4434: mol_type = other DNA; note mammalian_codon_optimized_tethered_system_MG160-4_MG3-6n_33 AA_linker
atgaagaggaccgctgatggttccgaatttgaatctcctaagaagaaacgaaaggttgttacccagaagtggacccatcgataccagttgaaacccggccgatgggtttttgcccccacagatgaggccaagaagtgcggtgctcacattaagcgcagcgtggcttccaggtggaaggccccaaacttctactatcacctcagaaatggcgggcacgttgcggccgtacggtcccacgaactgagccggtttttcttccgggcagatttggacgatttctttgggagagtgaaccggtctcgcgtgacccggtgccttaaaccttggttctcatacgccgaagcaagggagatggcctcagaatctgtcgtgaagcgacctggagagacagcctttgtgctgccgtatgggttcgtgcagagccctatcctcgcatccttggccctggacaagagtaaactgggtagcctgctgagatcactggacgggggccgcgatttcacggtgagcgtctatgtcgacgacatcattatctctggagacgacgaagctcaacttaaagaggtagcatcccgccttgagagagtggcgagtgaggccctgtttccactcagcagtggcaaaactcagggacccgcctctggagtgactgtttttaacatagaactgtcccatagaatgctcaggattaccgatgataggctcgcttcactgaggctcgactatcaggcgactgcatctgagcattgtaaagctggcatcgtctcctacgtatacagtgtgaatccagatcaggtcgctcaagtgacatctggcggcagcagcggcggctcaagcggaagtgaaacacctggaacttccgaaagcgctacgcctgaatcttctggtggatcttctggcggatcttccgcatgcatgtcaacggacatgaagaactatcgtatcggggtcgacgtgggtgatcgaagcgtaggcctcgcagcgattgaatttgacgatgacggactgcctatacagaaactcgcattagtcaccttccgtcacgatggtggtctggatcctactaagaacaagacccctatgagtcgcaaggagacgcggggaatagccaggagaaccatgcgaatgaacagagagcggaaaagacggctccgtaacctggacaatgttttagaaaacttgggctactcagtcccggaaggaccagaacctgagacatatgaagcctggacctctcgggctcttctggcatccattaagctcgcaagtgccgatgagctgaatgaacatttggttagagcggtcagacatatggctcgacacaggggatgggccaatccgtggtggtctttagatcagctcgaaaaggctagtcaggagccaagcgagacattcgagatcatcctggcacgcgctagggagctgttcggagaaaaggtgcccgctaaccctacattaggtatgctgggcgccttagcggctaacaatgaggtactgcttcgacccagggacgagaagaaacgaaagaccggctacgtgagaggtacacccttaatgttcgcgcaggtcaggcagggagatcagctcgcggagctccgtcgaatctgcgaagttcaagggatcgaagatcaatatgaagctctgagattaggggtgttcgatcacaagcacccttacgtccctaaggaacgcgtcggaaaagacccactgaatccgagcacgaaccggaccatccgggctagtttggagttccaggaatttagaatattagattccgttgctaacctgagggtgagaatcggctcccgagctaaacgggagcttaccgaggcagagtacgacgcggccgtcgaatttcttatggattacgccgacaaggagcagccttcctgggctgacgttgcagagaaaatcggcgtacctggtaacaggctggtggcacccgtgttagaggacgtgcagcagaaaactgctccctatgataggtcttccgcggcatttgaaaaggcaatgggaaagaagaccgaagccagacagtggtgggaaagcactgatgatgaccaactgcggagtctcctgattgctttcctggtcgacgccaccaatgataccgaggaagcagcggcagaagccggacttagtgagttatataaatcatggcccgccgaggagagggaagcactctctaatatcgacttcgaaaagggaagagtggcctactcacaggaaaccttgagcaagttgtccgaatacatgcacgaataccgagttggcttgcatgaggccagaaaggctgtctttggggtcgacgatacatggcgcccaccacttgataaactggaagagcctacaggacagcctgctgtcgaccgcgttcttacaatactcaggcggttcgtgctggactgcgagcgccagtggggtcggcccagagccatcaccgtcgagcatacaaggactggattgatgggaccaacgcagcggcagaaaattcttaacgaacagaagaagaatcgggctgacaatgagcgtatccgcgacgaacttcgggaaagcggggtagataacccatcacgggcggaagttcggcgtcatttgatagtgcaagaacaggagtgccagtgtctgtattgtgggacaatgatcaccactaccactagtgaactggacgccatagtgccgcgggccggtggcggctcaagtaggcgtgagaacttggccgccgtctgtcgcgcttgtaatgccaagaagaaaagggagttattttatgcatgggccgggccggtgaagtcccaggagactatcgagagggtgagacagcttaaagccttcaaagactccaagaaagccaagatgtttaagaatcagatccgacgattaaatcagaccgaagcagatgaaccgatagacgagcgttctcttgcatccacttcatacgccgcagtcgctgtcagggagcggttagaacaacattttaacgagggtctggcacttgatgataaatcccgagtggtactggacgtgtatgccggcgctgtgacaagagagagtcgccgggcgggcgggatcgacgagcggattttattaaggggcgaacgggataagaaccgattcgacgttaggcaccatgcagtcgacgctgcagtgatgacactgcttaataggtccgtggcactgaccctggagcaacgtagccagctgcggcgcacattctatgaacagggactggacaagctggaccgcaatcaacttaagcctgaagaggactggagagatttcaccggcctggcccctgcatcccaggagaaattcttggagtggcggaaagctgccacaattctcggagacttgctggctgaggcaatagaagatgacagcattgcggttgtatcaccactccgccttagaccccagaacggatctgtgcaccttgaaaccatatccgctgtgaagaagcagacactcggttccgattggccagccgatgccgttaagagaatcgtggaccctgaaatttatcttgccatgaaagacgctctgggcaagctgaaggagctcccagaagactctgcacgaagcctggaactgccagatgggcgcttcgttgaagccgacgacgaagtcttgttcttccccgagaacgccgcatctattctgacacctcgcggggttgctgagattggtgggtcaatacaccacgcacggctctacggctggctgaccaagaagggagaactgaaggtagggatgcttagagtctacggggccgagttcccttggctgatgagggaaagtgggagccgaaacgttctgtccatgccaattcaccggggcagtcagtctttcagagatatgcaagatacaactaggaaggcggtggagagcggcgaagccgtcgagttcgcatggatcacacagaatgacgagctcgaatttgacccggatgactatatcgcccacggcggtaaggacgaactgcggcagttcctcgggttcatgccagagtgccggtggagagtcgatggctttaagaagaattatcagatcagaatcagaccagccatgctgtcacgagaacagctgccatccgatatacagaggcggctggagtctaaaacactgaccaagaatgaaagcttgctgctcaaggctcttgacacgggactcgtggttgcgatcggcggacttctcccattagaaaccttgaaggtgatacggcgaaacaatcttggatttcccagatggcgcggcaatggaaatcttccgacatcttttgaggtacgcagctccgctctccgagccctgggagtagaaggtcctaggggcggcggaggcagctacccctatgatgtacctgattatgcttctggcggacccaagaagaagaggaaagtcggtggttctcctaagaaaaagagaaaggtcggatccggc

SEQ ID NO: 1781 - DNA, 4431 bp, synthetic construct
  source 1..4431: mol_type = other DNA; note mammalian_codon_optimized_tethered_system_MG160-4_MG3-6n_32 AA_linker
atgaagaggaccgctgatggttccgaatttgaatctcctaagaagaaacgaaaggttgttacccagaagtggacccatcgataccagttgaaacccggccgatgggtttttgcccccacagatgaggccaagaagtgcggtgctcacattaagcgcagcgtggcttccaggtggaaggccccaaacttctactatcacctcagaaatggcgggcacgttgcggccgtacggtcccacgaactgagccggtttttcttccgggcagatttggacgatttctttgggagagtgaaccggtctcgcgtgacccggtgccttaaaccttggttctcatacgccgaagcaagggagatggcctcagaatctgtcgtgaagcgacctggagagacagcctttgtgctgccgtatgggttcgtgcagagccctatcctcgcatccttggccctggacaagagtaaactgggtagcctgctgagatcactggacgggggccgcgatttcacggtgagcgtctatgtcgacgacatcattatctctggagacgacgaagctcaacttaaagaggtagcatcccgccttgagagagtggcgagtgaggccctgtttccactcagcagtggcaaaactcagggacccgcctctggagtgactgtttttaacatagaactgtcccatagaatgctcaggattaccgatgataggctcgcttcactgaggctcgactatcaggcgactgcatctgagcattgtaaagctggcatcgtctcctacgtatacagtgtgaatccagatcaggtcgctcaagtgacaagtggtggcagctccggcggctcttctggctccgaaactcctggcacttctgaatccgccaccccagagagtagtggcggtagctcaggcggaagtgcatgcatgtcaacggacatgaagaactatcgtatcggggtcgacgtgggtgatcgaagcgtaggcctcgcagcgattgaatttgacgatgacggactgcctatacagaaactcgcattagtcaccttccgtcacgatggtggtctggatcctactaagaacaagacccctatgagtcgcaaggagacgcggggaatagccaggagaaccatgcgaatgaacagagagcggaaaagacggctccgtaacctggacaatgttttagaaaacttgggctactcagtcccggaaggaccagaacctgagacatatgaagcctggacctctcgggctcttctggcatccattaagctcgcaagtgccgatgagctgaatgaacatttggttagagcggtcagacatatggctcgacacaggggatgggccaatccgtggtggtctttagatcagctcgaaaaggctagtcaggagccaagcgagacattcgagatcatcctggcacgcgctagggagctgttcggagaaaaggtgcccgctaaccctacattaggtatgctgggcgccttagcggctaacaatgaggtactgcttcgacccagggacgagaagaaacgaaagaccggctacgtgagaggtacacccttaatgttcgcgcaggtcaggcagggagatcagctcgcggagctccgtcgaatctgcgaagttcaagggatcgaagatcaatatgaagctctgagattaggggtgttcgatcacaagcacccttacgtccctaaggaacgcgtcggaaaagacccactgaatccgagcacgaaccggaccatccgggctagtttggagttccaggaatttagaatattagattccgttgctaacctgagggtgagaatcggctcccgagctaaacgggagcttaccgaggcagagtacgacgcggccgtcgaatttcttatggattacgccgacaaggagcagccttcctgggctgacgttgcagagaaaatcggcgtacctggtaacaggctggtggcacccgtgttagaggacgtgcagcagaaaactgctccctatgataggtcttccgcggcatttgaaaaggcaatgggaaagaagaccgaagccagacagtggtgggaaagcactgatgatgaccaactgcggagtctcctgattgctttcctggtcgacgccaccaatgataccgaggaagcagcggcagaagccggacttagtgagttatataaatcatggcccgccgaggagagggaagcactctctaatatcgacttcgaaaagggaagagtggcctactcacaggaaaccttgagcaagttgtccgaatacatgcacgaataccgagttggcttgcatgaggccagaaaggctgtctttggggtcgacgatacatggcgcccaccacttgataaactggaagagcctacaggacagcctgctgtcgaccgcgttcttacaatactcaggcggttcgtgctggactgcgagcgccagtggggtcggcccagagccatcaccgtcgagcatacaaggactggattgatgggaccaacgcagcggcagaaaattcttaacgaacagaagaagaatcgggctgacaatgagcgtatccgcgacgaacttcgggaaagcggggtagataacccatcacgggcggaagttcggcgtcatttgatagtgcaagaacaggagtgccagtgtctgtattgtgggacaatgatcaccactaccactagtgaactggacgccatagtgccgcgggccggtggcggctcaagtaggcgtgagaacttggccgccgtctgtcgcgcttgtaatgccaagaagaaaagggagttattttatgcatgggccgggccggtgaagtcccaggagactatcgagagggtgagacagcttaaagccttcaaagactccaagaaagccaagatgtttaagaatcagatccgacgattaaatcagaccgaagcagatgaaccgatagacgagcgttctcttgcatccacttcatacgccgcagtcgctgtcagggagcggttagaacaacattttaacgagggtctggcacttgatgataaatcccgagtggtactggacgtgtatgccggcgctgtgacaagagagagtcgccgggcgggcgggatcgacgagcggattttattaaggggcgaacgggataagaaccgattcgacgttaggcaccatgcagtcgacgctgcagtgatgacactgcttaataggtccgtggcactgaccctggagcaacgtagccagctgcggcgcacattctatgaacagggactggacaagctggaccgcaatcaacttaagcctgaagaggactggagagatttcaccggcctggcccctgcatcccaggagaaattcttggagtggcggaaagctgccacaattctcggagacttgctggctgaggcaatagaagatgacagcattgcggttgtatcaccactccgccttagaccccagaacggatctgtgcaccttgaaaccatatccgctgtgaagaagcagacactcggttccgattggccagccgatgccgttaagagaatcgtggaccctgaaatttatcttgccatgaaagacgctctgggcaagctgaaggagctcccagaagactctgcacgaagcctggaactgccagatgggcgcttcgttgaagccgacgacgaagtcttgttcttccccgagaacgccgcatctattctgacacctcgcggggttgctgagattggtgggtcaatacaccacgcacggctctacggctggctgaccaagaagggagaactgaaggtagggatgcttagagtctacggggccgagttcccttggctgatgagggaaagtgggagccgaaacgttctgtccatgccaattcaccggggcagtcagtctttcagagatatgcaagatacaactaggaaggcggtggagagcggcgaagccgtcgagttcgcatggatcacacagaatgacgagctcgaatttgacccggatgactatatcgcccacggcggtaaggacgaactgcggcagttcctcgggttcatgccagagtgccggtggagagtcgatggctttaagaagaattatcagatcagaatcagaccagccatgctgtcacgagaacagctgccatccgatatacagaggcggctggagtctaaaacactgaccaagaatgaaagcttgctgctcaaggctcttgacacgggactcgtggttgcgatcggcggacttctcccattagaaaccttgaaggtgatacggcgaaacaatcttggatttcccagatggcgcggcaatggaaatcttccgacatcttttgaggtacgcagctccgctctccgagccctgggagtagaaggtcctaggggcggcggaggcagctacccctatgatgtacctgattatgcttctggcggacccaagaagaagaggaaagtcggtggttctcctaagaaaaagagaaaggtcggatccggc

SEQ ID NO: 1782 - DNA, 4467 bp, synthetic construct
  source 1..4467: mol_type = other DNA; note mammalian_codon_optimized_tethered_system_MG160-4_MG3-6n_44 AA_linker
atgaagaggaccgctgatggttccgaatttgaatctcctaagaagaaacgaaaggttgttacccagaagtggacccatcgataccagttgaaacccggccgatgggtttttgcccccacagatgaggccaagaagtgcggtgctcacattaagcgcagcgtggcttccaggtggaaggccccaaacttctactatcacctcagaaatggcgggcacgttgcggccgtacggtcccacgaactgagccggtttttcttccgggcagatttggacgatttctttgggagagtgaaccggtctcgcgtgacccggtgccttaaaccttggttctcatacgccgaagcaagggagatggcctcagaatctgtcgtgaagcgacctggagagacagcctttgtgctgccgtatgggttcgtgcagagccctatcctcgcatccttggccctggacaagagtaaactgggtagcctgctgagatcactggacgggggccgcgatttcacggtgagcgtctatgtcgacgacatcattatctctggagacgacgaagctcaacttaaagaggtagcatcccgccttgagagagtggcgagtgaggccctgtttccactcagcagtggcaaaactcagggacccgcctctggagtgactgtttttaacatagaactgtcccatagaatgctcaggattaccgatgataggctcgcttcactgaggctcgactatcaggcgactgcatctgagcattgtaaagctggcatcgtctcctacgtatacagtgtgaatccagatcaggtcgctcaagtgacaaaaggaaaaggtaaaggaatgggagctgggacgctctccactgataaaggggagagtttggggattaaatatgaagaaggacagtcacacagacccactaatccaaatgcgtctcgcatggcgcagaaggtggcatgcatgtcaacggacatgaagaactatcgtatcggggtcgacgtgggtgatcgaagcgtaggcctcgcagcgattgaatttgacgatgacggactgcctatacagaaactcgcattagtcaccttccgtcacgatggtggtctggatcctactaagaacaagacccctatgagtcgcaaggagacgcggggaatagccaggagaaccatgcgaatgaacagagagcggaaaagacggctccgtaacctggacaatgttttagaaaacttgggctactcagtcccggaaggaccagaacctgagacatatgaagcctggacctctcgggctcttctggcatccattaagctcgcaagtgccgatgagctgaatgaacatttggttagagcggtcagacatatggctcgacacaggggatgggccaatccgtggtggtctttagatcagctcgaaaaggctagtcaggagccaagcgagacattcgagatcatcctggcacgcgctagggagctgttcggagaaaaggtgcccgctaaccctacattaggtatgctgggcgccttagcggctaacaatgaggtactgcttcgacccagggacgagaagaaacgaaagaccggctacgtgagaggtacacccttaatgttcgcgcaggtcaggcagggagatcagctcgcggagctccgtcgaatctgcgaagttcaagggatcgaagatcaatatgaagctctgagattaggggtgttcgatcacaagcacccttacgtccctaaggaacgcgtcggaaaagacccactgaatccgagcacgaaccggaccatccgggctagtttggagttccaggaatttagaatattagattccgttgctaacctgagggtgagaatcggctcccgagctaaacgggagcttaccgaggcagagtacgacgcggccgtcgaatttcttatggattacgccgacaaggagcagccttcctgggctgacgttgcagagaaaatcggcgtacctggtaacaggctggtggcacccgtgttagaggacgtgcagcagaaaactgctccctatgataggtcttccgcggcatttgaaaaggcaatgggaaagaagaccgaagccagacagtggtgggaaagcactgatgatgaccaactgcggagtctcctgattgctttcctggtcgacgccaccaatgataccgaggaagcagcggcagaagccggacttagtgagttatataaatcatggcccgccgaggagagggaagcactctctaatatcgacttcgaaaagggaagagtggcctactcacaggaaaccttgagcaagttgtccgaatacatgcacgaataccgagttggcttgcatgaggccagaaaggctgtctttggggtcgacgatacatggcgcccaccacttgataaactggaagagcctacaggacagcctgctgtcgaccgcgttcttacaatactcaggcggttcgtgctggactgcgagcgccagtggggtcggcccagagccatcaccgtcgagcatacaaggactggattgatgggaccaacgcagcggcagaaaattcttaacgaacagaagaagaatcgggctgacaatgagcgtatccgcgacgaacttcgggaaagcggggtagataacccatcacgggcggaagttcggcgtcatttgatagtgcaagaacaggagtgccagtgtctgtattgtgggacaatgatcaccactaccactagtgaactggacgccatagtgccgcgggccggtggcggctcaagtaggcgtgagaacttggccgccgtctgtcgcgcttgtaatgccaagaagaaaagggagttattttatgcatgggccgggccggtgaagtcccaggagactatcgagagggtgagacagcttaaagccttcaaagactccaagaaagccaagatgtttaagaatcagatccgacgattaaatcagaccgaagcagatgaaccgatagacgagcgttctcttgcatccacttcatacgccgcagtcgctgtcagggagcggttagaacaacattttaacgagggtctggcacttgatgataaatcccgagtggtactggacgtgtatgccggcgctgtgacaagagagagtcgccgggcgggcgggatcgacgagcggattttattaaggggcgaacgggataagaaccgattcgacgttaggcaccatgcagtcgacgctgcagtgatgacactgcttaataggtccgtggcactgaccctggagcaacgtagccagctgcggcgcacattctatgaacagggactggacaagctggaccgcaatcaacttaagcctgaagaggactggagagatttcaccggcctggcccctgcatcccaggagaaattcttggagtggcggaaagctgccacaattctcggagacttgctggctgaggcaatagaagatgacagcattgcggttgtatcaccactccgccttagaccccagaacggatctgtgcaccttgaaaccatatccgctgtgaagaagcagacactcggttccgattggccagccgatgccgttaagagaatcgtggaccctgaaatttatcttgccatgaaagacgctctgggcaagctgaaggagctcccagaagactctgcacgaagcctggaactgccagatgggcgcttcgttgaagccgacgacgaagtcttgttcttccccgagaacgccgcatctattctgacacctcgcggggttgctgagattggtgggtcaatacaccacgcacggctctacggctggctgaccaagaagggagaactgaaggtagggatgcttagagtctacggggccgagttcccttggctgatgagggaaagtgggagccgaaacgttctgtccatgccaattcaccggggcagtcagtctttcagagatatgcaagatacaactaggaaggcggtggagagcggcgaagccgtcgagttcgcatggatcacacagaatgacgagctcgaatttgacccggatgactatatcgcccacggcggtaaggacgaactgcggcagttcctcgggttcatgccagagtgccggtggagagtcgatggctttaagaagaattatcagatcagaatcagaccagccatgctgtcacgagaacagctgccatccgatatacagaggcggctggagtctaaaacactgaccaagaatgaaagcttgctgctcaaggctcttgacacgggactcgtggttgcgatcggcggacttctcccattagaaaccttgaaggtgatacggcgaaacaatcttggatttcccagatggcgcggcaatggaaatcttccgacatcttttgaggtacgcagctccgctctccgagccctgggagtagaaggtcctaggggcggcggaggcagctacccctatgatgtacctgattatgcttctggcggacccaagaagaagaggaaagtcggtggttctcctaagaaaaagagaaaggtcggatccggc

SEQ ID NO: 1783 - DNA, 4509 bp, synthetic construct
  source 1..4509: mol_type = other DNA; note mammalian_codon_optimized_tethered_system_MG160-4_MG3-6n_58 AA_linker
atgaagaggaccgctgatggttccgaatttgaatctcctaagaagaaacgaaaggttgttacccagaagtggacccatcgataccagttgaaacccggccgatgggtttttgcccccacagatgaggccaagaagtgcggtgctcacattaagcgcagcgtggcttccaggtggaaggccccaaacttctactatcacctcagaaatggcgggcacgttgcggccgtacggtcccacgaactgagccggtttttcttccgggcagatttggacgatttctttgggagagtgaaccggtctcgcgtgacccggtgccttaaaccttggttctcatacgccgaagcaagggagatggcctcagaatctgtcgtgaagcgacctggagagacagcctttgtgctgccgtatgggttcgtgcagagccctatcctcgcatccttggccctggacaagagtaaactgggtagcctgctgagatcactggacgggggccgcgatttcacggtgagcgtctatgtcgacgacatcattatctctggagacgacgaagctcaacttaaagaggtagcatcccgccttgagagagtggcgagtgaggccctgtttccactcagcagtggcaaaactcagggacccgcctctggagtgactgtttttaacatagaactgtcccatagaatgctcaggattaccgatgataggctcgcttcactgaggctcgactatcaggcgactgcatctgagcattgtaaagctggcatcgtctcctacgtatacagtgtgaatccagatcaggtcgctcaagtgacatgttatggtaagaaatatggacccaaaggaaaaggtaaaggtatgggtgccggcacgttatctacggataaaggagagagtctcggtatcaaatatgaagaagggcaaagccacaggcccaccaatcctaatgcatcccggatggcccagaaagtcggcggcagcgacggatgcgcatgcatgtcaacggacatgaagaactatcgtatcggggtcgacgtgggtgatcgaagcgtaggcctcgcagcgattgaatttgacgatgacggactgcctatacagaaactcgcattagtcaccttccgtcacgatggtggtctggatcctactaagaacaagacccctatgagtcgcaaggagacgcggggaatagccaggagaaccatgcgaatgaacagagagcggaaaagacggctccgtaacctggacaatgttttagaaaacttgggctactcagtcccggaaggaccagaacctgagacatatgaagcctggacctctcgggctcttctggcatccattaagctcgcaagtgccgatgagctgaatgaacatttggttagagcggtcagacatatggctcgacacaggggatgggccaatccgtggtggtctttagatcagctcgaaaaggctagtcaggagccaagcgagacattcgagatcatcctggcacgcgctagggagctgttcggagaaaaggtgcccgctaaccctacattaggtatgctgggcgccttagcggctaacaatgaggtactgcttcgacccagggacgagaagaaacgaaagaccggctacgtgagaggtacacccttaatgttcgcgcaggtcaggcagggagatcagctcgcggagctccgtcgaatctgcgaagttcaagggatcgaagatcaatatgaagctctgagattaggggtgttcgatcacaagcacccttacgtccctaaggaacgcgtcggaaaagacccactgaatccgagcacgaaccggaccatccgggctagtttggagttccaggaatttagaatattagattccgttgctaacctgagggtgagaatcggctcccgagctaaacgggagcttaccgaggcagagtacgacgcggccgtcgaatttcttatggattacgccgacaaggagcagccttcctgggctgacgttgcagagaaaatcggcgtacctggtaacaggctggtggcacccgtgttagaggacgtgcagcagaaaactgctccctatgataggtcttccgcggcatttgaaaaggcaatgggaaagaagaccgaagccagacagtggtgggaaagcactgatgatgaccaactgcggagtctcctgattgctttcctggtcgacgccaccaatgataccgaggaagcagcggcagaagccggacttagtgagttatataaatcatggcccgccgaggagagggaagcactctctaatatcgacttcgaaaagggaagagtggcctactcacaggaaaccttgagcaagttgtccgaatacatgcacgaataccgagttggcttgcatgaggccagaaaggctgtctttggggtcgacgatacatggcgcccaccacttgataaactggaagagcctacaggacagcctgctgtcgaccgcgttcttacaatactcaggcggttcgtgctggactgcgagcgccagtggggtcggcccagagccatcaccgtcgagcatacaaggactggattgatgggaccaacgcagcggcagaaaattcttaacgaacagaagaagaatcgggctgacaatgagcgtatccgcgacgaacttcgggaaagcggggtagataacccatcacgggcggaagttcggcgtcatttgatagtgcaagaacaggagtgccagtgtctgtattgtgggacaatgatcaccactaccactagtgaactggacgccatagtgccgcgggccggtggcggctcaagtaggcgtgagaacttggccgccgtctgtcgcgcttgtaatgccaagaagaaaagggagttattttatgcatgggccgggccggtgaagtcccaggagactatcgagagggtgagacagcttaaagccttcaaagactccaagaaagccaagatgtttaagaatcagatccgacgattaaatcagaccgaagcagatgaaccgatagacgagcgttctcttgcatccacttcatacgccgcagtcgctgtcagggagcggttagaacaacattttaacgagggtctggcacttgatgataaatcccgagtggtactggacgtgtatgccggcgctgtgacaagagagagtcgccgggcgggcgggatcgacgagcggattttattaaggggcgaacgggataagaaccgattcgacgttaggcaccatgcagtcgacgctgcagtgatgacactgcttaataggtccgtggcactgaccctggagcaacgtagccagctgcggcgcacattctatgaacagggactggacaagctggaccgcaatcaacttaagcctgaagaggactggagagatttcaccggcctggcccctgcatcccaggagaaattcttggagtggcggaaagctgccacaattctcggagacttgctggctgaggcaatagaagatgacagcattgcggttgtatcaccactccgccttagaccccagaacggatctgtgcaccttgaaaccatatccgctgtgaagaagcagacactcggttccgattggccagccgatgccgttaagagaatcgtggaccctgaaatttatcttgccatgaaagacgctctgggcaagctgaaggagctcccagaagactctgcacgaagcctggaactgccagatgggcgcttcgttgaagccgacgacgaagtcttgttcttccccgagaacgccgcatctattctgacacctcgcggggttgctgagattggtgggtcaatacaccacgcacggctctacggctggctgaccaagaagggagaactgaaggtagggatgcttagagtctacggggccgagttcccttggctgatgagggaaagtgggagccgaaacgttctgtccatgccaattcaccggggcagtcagtctttcagagatatgcaagatacaactaggaaggcggtggagagcggcgaagccgtcgagttcgcatggatcacacagaatgacgagctcgaatttgacccggatgactatatcgcccacggcggtaaggacgaactgcggcagttcctcgggttcatgccagagtgccggtggagagtcgatggctttaagaagaattatcagatcagaatcagaccagccatgctgtcacgagaacagctgccatccgatatacagaggcggctggagtctaaaacactgaccaagaatgaaagcttgctgctcaaggctcttgacacgggactcgtggttgcgatcggcggacttctcccattagaaaccttgaaggtgatacggcgaaacaatcttggatttcccagatggcgcggcaatggaaatcttccgacatcttttgaggtacgcagctccgctctccgagccctgggagtagaaggtcctaggggcggcggaggcagctacccctatgatgtacctgattatgcttctggcggacccaagaagaagaggaaagtcggtggttctcctaagaaaaagagaaaggtcggatccggc

SEQ ID NO: 1784 - RNA, 142 nt, synthetic construct
  source 1..142: mol_type = other RNA; note = HYGRO_STOP_BFP_MG3-6_pegRNA_PBS8
  modified_base 1..3: mod_base = OTHER; note = 2'O-methyl ribonucleotide
  modified_base 1..4: mod_base = OTHER; note = phosphorothioate linkage
  modified_base 140..142: mod_base = OTHER; note = 2'O-methyl ribonucleotide
  modified_base 139..142: mod_base = OTHER; note = phosphorothioate linkage
tggggatccaccggagcttaaggttgagaatcgaaagattcttaataaggcatccttccgatgctgacttctcaccgtccgttatccaataggagcgggcggtatgggcctgaccttcgcccgacttaagctccgttttttt

SEQ ID NO: 1785 - RNA, 144 nt, synthetic construct
  source 1..144: mol_type = other RNA; note = HYGRO_STOP_BFP_MG3-6_pegRNA_PBS10
  modified_base 1..3: mod_base = OTHER; note = 2'O-methyl ribonucleotide
  modified_base 1..4: mod_base = OTHER; note = phosphorothioate linkage
  modified_base 142..144: mod_base = OTHER; note = 2'O-methyl ribonucleotide
  modified_base 141..144: mod_base = OTHER; note = phosphorothioate linkage
tggggatccaccggagcttaaggttgagaatcgaaagattcttaataaggcatccttccgatgctgacttctcaccgtccgttatccaataggagcgggcggtatgggcctgaccttcgcccgacttaagctccggtttttttt

SEQ ID NO: 1786 - RNA, 147 nt, synthetic construct
  source 1..147: mol_type = other RNA; note = HYGRO_STOP_BFP_MG3-6_pegRNA_PBS13
  modified_base 1..3: mod_base = OTHER; note = 2'O-methyl ribonucleotide
  modified_base 1..4: mod_base = OTHER; note = phosphorothioate linkage
  modified_base 145..147: mod_base = OTHER; note = 2'O-methyl ribonucleotide
  modified_base 144..147: mod_base = OTHER; note = phosphorothioate linkage
tggggatccaccggagcttaaggttgagaatcgaaagattcttaataaggcatccttccgatgctgacttctcaccgtccgttatccaataggagcgggcggtatgggcctgaccttcgcccgacttaagctccggtggattttttt

SEQ ID NO: 1787 - DNA, 38 bp, synthetic construct
  source 1..38: mol_type = other DNA; note = HYGRO-STOP_BFP_forward_NGS_primer
gctcttccgatctnnnnngaccttctacccgacccaga

SEQ ID NO: 1788 - DNA, 38 bp, synthetic construct
  source 1..38: mol_type = other DNA; note = HYGRO-STOP_BFP_reverse_NGS_primer
gctcttccgatctnnnnngtgccctccatgtacagctt

SEQ ID NO: 1789 - DNA, 196 bp, synthetic construct
  source 1..196: mol_type = other DNA; note = HYGRO-STOP_BFP_targeted_amplified_ngs
gaccttctacccgacccagagccaaagaggccagtaatctcggacagagtcttggggatccaccggagcttaagaagggcaaaggtcaggccgggtcaggttctggtaaaggggaagaggacaacatggccataatcaaggagttcagcgagctgattaaggagaacatgcacatgaagctgtacatggagggcac

SEQ ID NO: 1790 - DNA, 4434 bp, synthetic construct
  source 1..4434: mol_type = other DNA; note mammalian_codon_optimized_tethered_system_MG3-6n_MG160-4_H2 30R
atgaagaggaccgctgatggttccgaatttgaatctcctaagaagaaacgaaaggttatgtcaacggacatgaagaactatcgtatcggggtcgacgtgggtgatcgaagcgtaggcctcgcagcgattgaatttgacgatgacggactgcctatacagaaactcgcattagtcaccttccgtcacgatggtggtctggatcctactaagaacaagacccctatgagtcgcaaggagacgcggggaatagccaggagaaccatgcgaatgaacagagagcggaaaagacggctccgtaacctggacaatgttttagaaaacttgggctactcagtcccggaaggaccagaacctgagacatatgaagcctggacctctcgggctcttctggcatccattaagctcgcaagtgccgatgagctgaatgaacatttggttagagcggtcagacatatggctcgacacaggggatgggccaatccgtggtggtctttagatcagctcgaaaaggctagtcaggagccaagcgagacattcgagatcatcctggcacgcgctagggagctgttcggagaaaaggtgcccgctaaccctacattaggtatgctgggcgccttagcggctaacaatgaggtactgcttcgacccagggacgagaagaaacgaaagaccggctacgtgagaggtacacccttaatgttcgcgcaggtcaggcagggagatcagctcgcggagctccgtcgaatctgcgaagttcaagggatcgaagatcaatatgaagctctgagattaggggtgttcgatcacaagcacccttacgtccctaaggaacgcgtcggaaaagacccactgaatccgagcacgaaccggaccatccgggctagtttggagttccaggaatttagaatattagattccgttgctaacctgagggtgagaatcggctcccgagctaaacgggagcttaccgaggcagagtacgacgcggccgtcgaatttcttatggattacgccgacaaggagcagccttcctgggctgacgttgcagagaaaatcggcgtacctggtaacaggctggtggcacccgtgttagaggacgtgcagcagaaaactgctccctatgataggtcttccgcggcatttgaaaaggcaatgggaaagaagaccgaagccagacagtggtgggaaagcactgatgatgaccaactgcggagtctcctgattgctttcctggtcgacgccaccaatgataccgaggaagcagcggcagaagccggacttagtgagttatataaatcatggcccgccgaggagagggaagcactctctaatatcgacttcgaaaagggaagagtggcctactcacaggaaaccttgagcaagttgtccgaatacatgcacgaataccgagttggcttgcatgaggccagaaaggctgtctttggggtcgacgatacatggcgcccaccacttgataaactggaagagcctacaggacagcctgctgtcgaccgcgttcttacaatactcaggcggttcgtgctggactgcgagcgccagtggggtcggcccagagccatcaccgtcgagcatacaaggactggattgatgggaccaacgcagcggcagaaaattcttaacgaacagaagaagaatcgggctgacaatgagcgtatccgcgacgaacttcgggaaagcggggtagataacccatcacgggcggaagttcggcgtcatttgatagtgcaagaacaggagtgccagtgtctgtattgtgggacaatgatcaccactaccactagtgaactggacgccatagtgccgcgggccggtggcggctcaagtaggcgtgagaacttggccgccgtctgtcgcgcttgtaatgccaagaagaaaagggagttattttatgcatgggccgggccggtgaagtcccaggagactatcgagagggtgagacagcttaaagccttcaaagactccaagaaagccaagatgtttaagaatcagatccgacgattaaatcagaccgaagcagatgaaccgatagacgagcgttctcttgcatccacttcatacgccgcagtcgctgtcagggagcggttagaacaacattttaacgagggtctggcacttgatgataaatcccgagtggtactggacgtgtatgccggcgctgtgacaagagagagtcgccgggcgggcgggatcgacgagcggattttattaaggggcgaacgggataagaaccgattcgacgttaggcaccatgcagtcgacgctgcagtgatgacactgcttaataggtccgtggcactgaccctggagcaacgtagccagctgcggcgcacattctatgaacagggactggacaagctggaccgcaatcaacttaagcctgaagaggactggagagatttcaccggcctggcccctgcatcccaggagaaattcttggagtggcggaaagctgccacaattctcggagacttgctggctgaggcaatagaagatgacagcattgcggttgtatcaccactccgccttagaccccagaacggatctgtgcaccttgaaaccatatccgctgtgaagaagcagacactcggttccgattggccagccgatgccgttaagagaatcgtggaccctgaaatttatcttgccatgaaagacgctctgggcaagctgaaggagctcccagaagactctgcacgaagcctggaactgccagatgggcgcttcgttgaagccgacgacgaagtcttgttcttccccgagaacgccgcatctattctgacacctcgcggggttgctgagattggtgggtcaatacaccacgcacggctctacggctggctgaccaagaagggagaactgaaggtagggatgcttagagtctacggggccgagttcccttggctgatgagggaaagtgggagccgaaacgttctgtccatgccaattcaccggggcagtcagtctttcagagatatgcaagatacaactaggaaggcggtggagagcggcgaagccgtcgagttcgcatggatcacacagaatgacgagctcgaatttgacccggatgactatatcgcccacggcggtaaggacgaactgcggcagttcctcgggttcatgccagagtgccggtggagagtcgatggctttaagaagaattatcagatcagaatcagaccagccatgctgtcacgagaacagctgccatccgatatacagaggcggctggagtctaaaacactgaccaagaatgaaagcttgctgctcaaggctcttgacacgggactcgtggttgcgatcggcggacttctcccattagaaaccttgaaggtgatacggcgaaacaatcttggatttcccagatggcgcggcaatggaaatcttccgacatcttttgaggtacgcagctccgctctccgagccctgggagtagaaggttctggcggcagcagcggcggctcaagcggaagtgaaacacctggaacttccgaaagcgctacgcctgaatcttctggtggatcttctggcggatcttccgcatgcgttacccagaagtggacccatcgataccagttgaaacccggccgatgggtttttgcccccacagatgaggccaagaagtgcggtgctcacattaagcgcagcgtggcttccaggtggaaggccccaaacttctactatcacctcagaaatggcgggcacgttgcggccgtacggtcccacgaactgagccggtttttcttccgggcagatttggacgatttctttgggagagtgaaccggtctcgcgtgacccggtgccttaaaccttggttctcatacgccgaagcaagggagatggcctcagaatctgtcgtgaagcgacctggagagacagcctttgtgctgccgtatgggttcgtgcagagccctatcctcgcatccttggccctggacaagagtaaactgggtagcctgctgagatcactggacgggggccgcgatttcacggtgagcgtctatgtcgacgacatcattatctctggagacgacgaagctcaacttaaagaggtagcatcccgccttgagagagtggcgagtgaggccctgtttccactcagcagtggcaaaactcagggacccgcctctggagtgactgtttttaacatagaactgtcccatagaatgctcaggattaccgatgataggctcgcttcactgaggctcgactatcaggcgactgcatctgagaggtgtaaagctggcatcgtctcctacgtatacagtgtgaatccagatcaggtcgctcaagtgacacctaggggcggcggaggcagctacccctatgatgtacctgattatgcttctggcggacccaagaagaagaggaaagtcggtggttctcctaagaaaaagagaaaggtcggatccggc

SEQ ID NO: 1791 - DNA, 4479 bp, synthetic construct
  source 1..4479: mol_type = other DNA; note mammalian_codon_optimized_tethered_system_MG160-4_H230R_MG3 -6n-K115
tgccaagcttccgagctctcgaattcccaccatgaagaggaccgctgatggttccgaatttgaatctcctaagaagaaacgaaaggttatgtcaacggacatgaagaactatcgtatcggggtcgacgtgggtgatcgaagcgtaggcctcgcagcgattgaatttgacgatgacggactgcctatacagaaactcgcattagtcaccttccgtcacgatggtggtctggatcctactaagaacaagacccctatgagtcgcaaggaaacgcggggaatagccaggagaaccatgcgaatgaacagagagcggaaaagacggctccgtaacctggacaatgttttagaaaacttgggctactcagtcccggaaggaccagaacctgagacatatgaagcctggacctctcgggctctgctggcatccattaagggtacctctggcggcagcagcggcggctcaagcggaagtgaaacacctggaacttccgaaagcgctacgcctgaatcttctggtggatcttctggcggatcttccgttacccagaagtggacccatcgataccagttgaaacccggccgatgggtttttgcccccacagatgaggccaagaagtgcggtgctcacattaagcgcagcgtggcttccaggtggaaggccccaaacttctactatcacctcagaaatggcgggcacgttgcggccgtacggtcccacgaactgagccggtttttcttccgggcagatttggacgatttctttgggagagtgaaccggtcccgcgtgacccggtgccttaaaccttggttctcatacgccgaagcaagggagatggcctcagaatctgtcgtgaagcgacctggagagacagcctttgtgctgccgtatgggttcgtgcagagccctatcctcgcatccttggccctggacaagagtaaactgggtagcctgctgagatcactggacgggggccgcgatttcacggtgagcgtctatgtcgacgacatcattatctctggagatgacgaagctcaacttaaagaggtagcatcccgccttgagagagtggcgagtgaggccctgtttccactcagcagtggcaaaactcagggacccgcctctggagtgactgtttttaacatagaactgtcccatagaatgctcaggattaccgatgataggctcgcttcactgaggctcgactatcaggcgactgcatctgagaggtgtaaagctggcatcgtgtcctacgtatacagtgtgaatccagatcaggtcgctcaagtgacaagcggcggcagtagcggcggcagttctggatctgaaacgcctggaacatctgagagcgccacccccgagagcagcggtggatcttctggtgggtcttctggtaccctcgcaagtgccgatgagctgaatgaacatttggttagagcggtcagacatatggctcgacacaggggatgggccaatccgtggtggtctttagatcagctcgaaaaggctagtcaggagccaagcgagacattcgagatcatcctggcacgcgctagggagctgttcggagaaaaggtgcccgctaaccctacattaggtatgctgggcgccttagcggctaacaatgaggtactgcttcgacccagggacgagaagaaacgaaagaccggctacgtgagaggtacacccttaatgttcgcgcaggtcaggcagggagatcagctcgcggagctccgtcgaatctgcgaagttcaagggatcgaagatcaatatgaagctctgagattaggggtgttcgatcacaagcacccttacgtccctaaggaacgcgtcggaaaagacccactgaatccgagcacgaaccggaccatccgggctagtttggagttccaggaatttagaatattagattccgttgctaacctgagggtgagaatcggctcccgagctaaacgggagcttaccgaggcagagtacgacgcggccgtcgaatttcttatggattacgccgacaaggagcagccttcctgggctgacgttgcagagaaaatcggcgtacctggtaacaggctggtggcacccgtgttagaggacgtgcagcagaaaactgctccctatgataggtcttccgcggcatttgaaaaggcaatgggaaagaagaccgaagccagacagtggtgggaaagcactgatgatgaccaactgcggagtctcctgattgctttcctggtcgacgccaccaatgataccgaggaagcagcggcagaagccggacttagtgagttatataaatcatggcccgccgaggagagggaagcactctctaatatcgacttcgaaaagggaagagtggcctactcacaggaaaccttgagcaagttgtccgaatacatgcacgaataccgagttggcttgcatgaggccagaaaggctgtctttggggtcgacgatacatggcgcccaccacttgataaactggaggagcctacaggacagcctgctgtcgaccgcgttcttacaatactcaggcggttcgtgctggactgcgagcgccagtggggtcggcccagagccatcaccgtcgagcatacaaggactggattgatgggaccaacgcagcggcagaaaattcttaacgaacagaagaagaatcgggctgacaatgagcgtatccgcgacgaacttcgggaaagcggggtagataacccatcacgggcggaagttcggcgtcatttgatagtgcaagaacaggagtgccagtgtctgtattgtgggacaatgatcaccactaccaccagtgaactggacgccatagtgccgcgggccggtggcggctcaagtaggcgtgagaacttggccgccgtctgtcgcgcttgtaatgccaagaagaaaagggagttattttatgcatgggccgggccggtgaagtcccaggagactatcgagagggtgagacagcttaaagccttcaaagactccaagaaagccaagatgtttaagaatcagatccgacgattaaatcagaccgaagcagatgaaccgatagacgagcgttctcttgcatccacttcatacgccgcagtcgctgtcagggagcggttagaacaacattttaacgagggtctggcacttgatgataaatcccgagtggtactggacgtgtatgccggcgctgtgacaagagagagtcgccgggcgggcgggatcgacgagcggattttattaaggggcgaacgggataagaaccgattcgacgttaggcaccatgcagtcgacgctgcagtgatgacactgcttaataggtccgtggcactgaccctggagcaacgtagccagctgcggcgcacattctatgaacagggactggacaagctggaccgcaatcaacttaagcctgaagaggactggagagatttcaccggcctggcccctgcatcccaggagaaattcttggagtggcggaaagctgccacaattctcggagacttgctggctgaggcaatagaagatgacagcattgcggttgtatcaccactccgccttagaccccagaacggatctgtgcaccttgaaaccatatccgctgtgaagaagcagacactcggttccgattggccagccgatgccgttaagagaatcgtggaccctgaaatttatcttgccatgaaagacgctctgggcaagctgaaggagctcccagaagactctgcacgaagcctggaactgccagatgggcgcttcgttgaagccgacgacgaagtcttgttcttccccgagaacgccgcatctattctgacacctcgcggggttgctgagattggtgggtcaatacaccacgcacggctctacggctggctgaccaagaagggagaactgaaggtagggatgcttagagtctacggggccgagttcccttggctgatgagggaaagtgggagccgaaacgttctgtccatgccaattcaccggggcagtcagtctttcagagatatgcaagatacaactaggaaggcggtggagagcggcgaagccgtcgagttcgcatggatcacacagaatgacgagctcgaatttgacccggatgactatatcgcccacggcggtaaggacgaactgcggcagttcctcgggttcatgccagagtgccggtggagagtcgatggctttaagaagaattatcagatcagaatcagaccagccatgctgtcacgagaacagctgccatccgatatacagaggcggctggagtctaaaacactgaccaagaatgaaagcttgctgctcaaggctcttgacacgggactcgtggttgcgatcggcggacttctcccattagaaaccttgaaggtgatacggcgaaacaatcttggatttcccagatggcgcggcaatggaaatcttccgacatcttttgaggtacgcagctccgctctccgagccctgggagtagaaggtcctaggggcggcggaggcagctaccc

SEQ ID NO: 1792 - DNA, 4479 bp, synthetic construct
  source 1..4479: mol_type = other DNA; note mammalian_codon_optimized_tethered_system_MG160-4_H230R_MG3 -6n-V208
tgccaagcttccgagctctcgaattcccaccatgaagaggaccgctgatggttccgaatttgaatctcctaagaagaaacgaaaggttatgtcaacggacatgaagaactatcgtatcggggtcgacgtgggtgatcgaagcgtaggcctcgcagcgattgaatttgacgatgacggactgcctatacagaaactcgcattagtcaccttccgtcacgatggtggtctggatcctactaagaacaagacccctatgagtcgcaaggaaacgcggggaatagccaggagaaccatgcgaatgaacagagagcggaaaagacggctccgtaacctggacaatgttttagaaaacttgggctactcagtcccggaaggaccagaacctgagacatatgaagcctggacctctcgggctctgctggcatccattaagctcgcaagtgccgatgagctgaatgaacatttggttagagcggtcagacatatggctcgacacaggggatgggccaatccgtggtggtctttagatcagctcgaaaaggctagtcaggagccaagcgagacattcgagatcatcctggcacgcgctagggagctgttcggagaaaaggtgcccgctaaccctacattaggtatgctgggcgccttagcggctaacaatgaggtactgcttcgacccagggacgagaagaaacgaaagaccggctacgtgggtacctctggcggcagcagcggcggctcaagcggaagtgaaacacctggaacttccgaaagcgctacgcctgaatcttctggtggatcttctggcggatcttccgttacccagaagtggacccatcgataccagttgaaacccggccgatgggtttttgcccccacagatgaggccaagaagtgcggtgctcacattaagcgcagcgtggcttccaggtggaaggccccaaacttctactatcacctcagaaatggcgggcacgttgcggccgtacggtcccacgaactgagccggtttttcttccgggcagatttggacgatttctttgggagagtgaaccggtcccgcgtgacccggtgccttaaaccttggttctcatacgccgaagcaagggagatggcctcagaatctgtcgtgaagcgacctggagagacagcctttgtgctgccgtatgggttcgtgcagagccctatcctcgcatccttggccctggacaagagtaaactgggtagcctgctgagatcactggacgggggccgcgatttcacggtgagcgtctatgtcgacgacatcattatctctggagatgacgaagctcaacttaaagaggtagcatcccgccttgagagagtggcgagtgaggccctgtttccactcagcagtggcaaaactcagggacccgcctctggagtgactgtttttaacatagaactgtcccatagaatgctcaggattaccgatgataggctcgcttcactgaggctcgactatcaggcgactgcatctgagaggtgtaaagctggcatcgtgtcctacgtatacagtgtgaatccagatcaggtcgctcaagtgacaagcggcggcagtagcggcggcagttctggatctgaaacgcctggaacatctgagagcgccacccccgagagcagcggtggatcttctggtgggtcttctggtaccagaggtacacccttaatgttcgcgcaggtcaggcagggagatcagctcgcggagctccgtcgaatctgcgaagttcaagggatcgaagatcaatatgaagctctgagattaggggtgttcgatcacaagcacccttacgtccctaaggaacgcgtcggaaaagacccactgaatccgagcacgaaccggaccatccgggctagtttggagttccaggaatttagaatattagattccgttgctaacctgagggtgagaatcggctcccgagctaaacgggagcttaccgaggcagagtacgacgcggccgtcgaatttcttatggattacgccgacaaggagcagccttcctgggctgacgttgcagagaaaatcggcgtacctggtaacaggctggtggcacccgtgttagaggacgtgcagcagaaaactgctccctatgataggtcttccgcggcatttgaaaaggcaatgggaaagaagaccgaagccagacagtggtgggaaagcactgatgatgaccaactgcggagtctcctgattgctttcctggtcgacgccaccaatgataccgaggaagcagcggcagaagccggacttagtgagttatataaatcatggcccgccgaggagagggaagcactctctaatatcgacttcgaaaagggaagagtggcctactcacaggaaaccttgagcaagttgtccgaatacatgcacgaataccgagttggcttgcatgaggccagaaaggctgtctttggggtcgacgatacatggcgcccaccacttgataaactggaggagcctacaggacagcctgctgtcgaccgcgttcttacaatactcaggcggttcgtgctggactgcgagcgccagtggggtcggcccagagccatcaccgtcgagcatacaaggactggattgatgggaccaacgcagcggcagaaaattcttaacgaacagaagaagaatcgggctgacaatgagcgtatccgcgacgaacttcgggaaagcggggtagataacccatcacgggcggaagttcggcgtcatttgatagtgcaagaacaggagtgccagtgtctgtattgtgggacaatgatcaccactaccaccagtgaactggacgccatagtgccgcgggccggtggcggctcaagtaggcgtgagaacttggccgccgtctgtcgcgcttgtaatgccaagaagaaaagggagttattttatgcatgggccgggccggtgaagtcccaggagactatcgagagggtgagacagcttaaagccttcaaagactccaagaaagccaagatgtttaagaatcagatccgacgattaaatcagaccgaagcagatgaaccgatagacgagcgttctcttgcatccacttcatacgccgcagtcgctgtcagggagcggttagaacaacattttaacgagggtctggcacttgatgataaatcccgagtggtactggacgtgtatgccggcgctgtgacaagagagagtcgccgggcgggcgggatcgacgagcggattttattaaggggcgaacgggataagaaccgattcgacgttaggcaccatgcagtcgacgctgcagtgatgacactgcttaataggtccgtggcactgaccctggagcaacgtagccagctgcggcgcacattctatgaacagggactggacaagctggaccgcaatcaacttaagcctgaagaggactggagagatttcaccggcctggcccctgcatcccaggagaaattcttggagtggcggaaagctgccacaattctcggagacttgctggctgaggcaatagaagatgacagcattgcggttgtatcaccactccgccttagaccccagaacggatctgtgcaccttgaaaccatatccgctgtgaagaagcagacactcggttccgattggccagccgatgccgttaagagaatcgtggaccctgaaatttatcttgccatgaaagacgctctgggcaagctgaaggagctcccagaagactctgcacgaagcctggaactgccagatgggcgcttcgttgaagccgacgacgaagtcttgttcttccccgagaacgccgcatctattctgacacctcgcggggttgctgagattggtgggtcaatacaccacgcacggctctacggctggctgaccaagaagggagaactgaaggtagggatgcttagagtctacggggccgagttcccttggctgatgagggaaagtgggagccgaaacgttctgtccatgccaattcaccggggcagtcagtctttcagagatatgcaagatacaactaggaaggcggtggagagcggcgaagccgtcgagttcgcatggatcacacagaatgacgagctcgaatttgacccggatgactatatcgcccacggcggtaaggacgaactgcggcagttcctcgggttcatgccagagtgccggtggagagtcgatggctttaagaagaattatcagatcagaatcagaccagccatgctgtcacgagaacagctgccatccgatatacagaggcggctggagtctaaaacactgaccaagaatgaaagcttgctgctcaaggctcttgacacgggactcgtggttgcgatcggcggacttctcccattagaaaccttgaaggtgatacggcgaaacaatcttggatttcccagatggcgcggcaatggaaatcttccgacatcttttgaggtacgcagctccgctctccgagccctgggagtagaaggtcctaggggcggcggaggcagctaccc

SEQ ID NO: 1793 - DNA, 4479 bp, synthetic construct
  source 1..4479: mol_type = other DNA; note mammalian_codon_optimized_tethered_system_MG160-4_H230R_MG3 -6n-K368
tgccaagcttccgagctctcgaattcccaccatgaagaggaccgctgatggttccgaatttgaatctcctaagaagaaacgaaaggttatgtcaacggacatgaagaactatcgtatcggggtcgacgtgggtgatcgaagcgtaggcctcgcagcgattgaatttgacgatgacggactgcctatacagaaactcgcattagtcaccttccgtcacgatggtggtctggatcctactaagaacaagacccctatgagtcgcaaggaaacgcggggaatagccaggagaaccatgcgaatgaacagagagcggaaaagacggctccgtaacctggacaatgttttagaaaacttgggctactcagtcccggaaggaccagaacctgagacatatgaagcctggacctctcgggctctgctggcatccattaagctcgcaagtgccgatgagctgaatgaacatttggttagagcggtcagacatatggctcgacacaggggatgggccaatccgtggtggtctttagatcagctcgaaaaggctagtcaggagccaagcgagacattcgagatcatcctggcacgcgctagggagctgttcggagaaaaggtgcccgctaaccctacattaggtatgctgggcgccttagcggctaacaatgaggtactgcttcgacccagggacgagaagaaacgaaagaccggctacgtgagaggtacacccttaatgttcgcgcaggtcaggcagggagatcagctcgcggagctccgtcgaatctgcgaagttcaagggatcgaagatcaatatgaagctctgagattaggggtgttcgatcacaagcacccttacgtccctaaggaacgcgtcggaaaagacccactgaatccgagcacgaaccggaccatccgggctagtttggagttccaggaatttagaatattagattccgttgctaacctgagggtgagaatcggctcccgagctaaacgggagcttaccgaggcagagtacgacgcggccgtcgaatttcttatggattacgccgacaaggagcagccttcctgggctgacgttgcagagaaaatcggcgtacctggtaacaggctggtggcacccgtgttagaggacgtgcagcagaaaactgctccctatgataggtcttccgcggcatttgaaaaggcaatgggaaagggtacctctggcggcagcagcggcggctcaagcggaagtgaaacacctggaacttccgaaagcgctacgcctgaatcttctggtggatcttctggcggatcttccgttacccagaagtggacccatcgataccagttgaaacccggccgatgggtttttgcccccacagatgaggccaagaagtgcggtgctcacattaagcgcagcgtggcttccaggtggaaggccccaaacttctactatcacctcagaaatggcgggcacgttgcggccgtacggtcccacgaactgagccggtttttcttccgggcagatttggacgatttctttgggagagtgaaccggtcccgcgtgacccggtgccttaaaccttggttctcatacgccgaagcaagggagatggcctcagaatctgtcgtgaagcgacctggagagacagcctttgtgctgccgtatgggttcgtgcagagccctatcctcgcatccttggccctggacaagagtaaactgggtagcctgctgagatcactggacgggggccgcgatttcacggtgagcgtctatgtcgacgacatcattatctctggagatgacgaagctcaacttaaagaggtagcatcccgccttgagagagtggcgagtgaggccctgtttccactcagcagtggcaaaactcagggacccgcctctggagtgactgtttttaacatagaactgtcccatagaatgctcaggattaccgatgataggctcgcttcactgaggctcgactatcaggcgactgcatctgagaggtgtaaagctggcatcgtgtcctacgtatacagtgtgaatccagatcaggtcgctcaagtgacaagcggcggcagtagcggcggcagttctggatctgaaacgcctggaacatctgagagcgccacccccgagagcagcggtggatcttctggtgggtcttctggtaccaagaccgaagccagacagtggtgggaaagcactgatgatgaccaactgcggagtctcctgattgctttcctggtcgacgccaccaatgataccgaggaagcagcggcagaagccggacttagtgagttatataaatcatggcccgccgaggagagggaagcactctctaatatcgacttcgaaaagggaagagtggcctactcacaggaaaccttgagcaagttgtccgaatacatgcacgaataccgagttggcttgcatgaggccagaaaggctgtctttggggtcgacgatacatggcgcccaccacttgataaactggaggagcctacaggacagcctgctgtcgaccgcgttcttacaatactcaggcggttcgtgctggactgcgagcgccagtggggtcggcccagagccatcaccgtcgagcatacaaggactggattgatgggaccaacgcagcggcagaaaattcttaacgaacagaagaagaatcgggctgacaatgagcgtatccgcgacgaacttcgggaaagcggggtagataacccatcacgggcggaagttcggcgtcatttgatagtgcaagaacaggagtgccagtgtctgtattgtgggacaatgatcaccactaccaccagtgaactggacgccatagtgccgcgggccggtggcggctcaagtaggcgtgagaacttggccgccgtctgtcgcgcttgtaatgccaagaagaaaagggagttattttatgcatgggccgggccggtgaagtcccaggagactatcgagagggtgagacagcttaaagccttcaaagactccaagaaagccaagatgtttaagaatcagatccgacgattaaatcagaccgaagcagatgaaccgatagacgagcgttctcttgcatccacttcatacgccgcagtcgctgtcagggagcggttagaacaacattttaacgagggtctggcacttgatgataaatcccgagtggtactggacgtgtatgccggcgctgtgacaagagagagtcgccgggcgggcgggatcgacgagcggattttattaaggggcgaacgggataagaaccgattcgacgttaggcaccatgcagtcgacgctgcagtgatgacactgcttaataggtccgtggcactgaccctggagcaacgtagccagctgcggcgcacattctatgaacagggactggacaagctggaccgcaatcaacttaagcctgaagaggactggagagatttcaccggcctggcccctgcatcccaggagaaattcttggagtggcggaaagctgccacaattctcggagacttgctggctgaggcaatagaagatgacagcattgcggttgtatcaccactccgccttagaccccagaacggatctgtgcaccttgaaaccatatccgctgtgaagaagcagacactcggttccgattggccagccgatgccgttaagagaatcgtggaccctgaaatttatcttgccatgaaagacgctctgggcaagctgaaggagctcccagaagactctgcacgaagcctggaactgccagatgggcgcttcgttgaagccgacgacgaagtcttgttcttccccgagaacgccgcatctattctgacacctcgcggggttgctgagattggtgggtcaatacaccacgcacggctctacggctggctgaccaagaagggagaactgaaggtagggatgcttagagtctacggggccgagttcccttggctgatgagggaaagtgggagccgaaacgttctgtccatgccaattcaccggggcagtcagtctttcagagatatgcaagatacaactaggaaggcggtggagagcggcgaagccgtcgagttcgcatggatcacacagaatgacgagctcgaatttgacccggatgactatatcgcccacggcggtaaggacgaactgcggcagttcctcgggttcatgccagagtgccggtggagagtcgatggctttaagaagaattatcagatcagaatcagaccagccatgctgtcacgagaacagctgccatccgatatacagaggcggctggagtctaaaacactgaccaagaatgaaagcttgctgctcaaggctcttgacacgggactcgtggttgcgatcggcggacttctcccattagaaaccttgaaggtgatacggcgaaacaatcttggatttcccagatggcgcggcaatggaaatcttccgacatcttttgaggtacgcagctccgctctccgagccctgggagtagaaggtcctaggggcggcggaggcagctaccc

SEQ ID NO: 1794 - DNA, 4479 bp, synthetic construct
  source 1..4479: mol_type = other DNA; note mammalian_codon_optimized_tethered_system_MG160-4_H230R_MG3 -6n-D550
tgccaagcttccgagctctcgaattcccaccatgaagaggaccgctgatggttccgaatttgaatctcctaagaagaaacgaaaggttatgtcaacggacatgaagaactatcgtatcggggtcgacgtgggtgatcgaagcgtaggcctcgcagcgattgaatttgacgatgacggactgcctatacagaaactcgcattagtcaccttccgtcacgatggtggtctggatcctactaagaacaagacccctatgagtcgcaaggaaacgcggggaatagccaggagaaccatgcgaatgaacagagagcggaaaagacggctccgtaacctggacaatgttttagaaaacttgggctactcagtcccggaaggaccagaacctgagacatatgaagcctggacctctcgggctctgctggcatccattaagctcgcaagtgccgatgagctgaatgaacatttggttagagcggtcagacatatggctcgacacaggggatgggccaatccgtggtggtctttagatcagctcgaaaaggctagtcaggagccaagcgagacattcgagatcatcctggcacgcgctagggagctgttcggagaaaaggtgcccgctaaccctacattaggtatgctgggcgccttagcggctaacaatgaggtactgcttcgacccagggacgagaagaaacgaaagaccggctacgtgagaggtacacccttaatgttcgcgcaggtcaggcagggagatcagctcgcggagctccgtcgaatctgcgaagttcaagggatcgaagatcaatatgaagctctgagattaggggtgttcgatcacaagcacccttacgtccctaaggaacgcgtcggaaaagacccactgaatccgagcacgaaccggaccatccgggctagtttggagttccaggaatttagaatattagattccgttgctaacctgagggtgagaatcggctcccgagctaaacgggagcttaccgaggcagagtacgacgcggccgtcgaatttcttatggattacgccgacaaggagcagccttcctgggctgacgttgcagagaaaatcggcgtacctggtaacaggctggtggcacccgtgttagaggacgtgcagcagaaaactgctccctatgataggtcttccgcggcatttgaaaaggcaatgggaaagaagaccgaagccagacagtggtgggaaagcactgatgatgaccaactgcggagtctcctgattgctttcctggtcgacgccaccaatgataccgaggaagcagcggcagaagccggacttagtgagttatataaatcatggcccgccgaggagagggaagcactctctaatatcgacttcgaaaagggaagagtggcctactcacaggaaaccttgagcaagttgtccgaatacatgcacgaataccgagttggcttgcatgaggccagaaaggctgtctttggggtcgacgatacatggcgcccaccacttgataaactggaggagcctacaggacagcctgctgtcgaccgcgttcttacaatactcaggcggttcgtgctggactgcgagcgccagtggggtcggcccagagccatcaccgtcgagcatacaaggactggattgatgggaccaacgcagcggcagaaaattcttaacgaacagaagaagaatcgggctgacaatgagcgtatccgcgacgaacttcgggaaagcggggtagatggtacctctggcggcagcagcggcggctcaagcggaagtgaaacacctggaacttccgaaagcgctacgcctgaatcttctggtggatcttctggcggatcttccgttacccagaagtggacccatcgataccagttgaaacccggccgatgggtttttgcccccacagatgaggccaagaagtgcggtgctcacattaagcgcagcgtggcttccaggtggaaggccccaaacttctactatcacctcagaaatggcgggcacgttgcggccgtacggtcccacgaactgagccggtttttcttccgggcagatttggacgatttctttgggagagtgaaccggtcccgcgtgacccggtgccttaaaccttggttctcatacgccgaagcaagggagatggcctcagaatctgtcgtgaagcgacctggagagacagcctttgtgctgccgtatgggttcgtgcagagccctatcctcgcatccttggccctggacaagagtaaactgggtagcctgctgagatcactggacgggggccgcgatttcacggtgagcgtctatgtcgacgacatcattatctctggagatgacgaagctcaacttaaagaggtagcatcccgccttgagagagtggcgagtgaggccctgtttccactcagcagtggcaaaactcagggacccgcctctggagtgactgtttttaacatagaactgtcccatagaatgctcaggattaccgatgataggctcgcttcactgaggctcgactatcaggcgactgcatctgagaggtgtaaagctggcatcgtgtcctacgtatacagtgtgaatccagatcaggtcgctcaagtgacaagcggcggcagtagcggcggcagttctggatctgaaacgcctggaacatctgagagcgccacccccgagagcagcggtggatcttctggtgggtcttctggtaccaacccatcacgggcggaagttcggcgtcatttgatagtgcaagaacaggagtgccagtgtctgtattgtgggacaatgatcaccactaccaccagtgaactggacgccatagtgccgcgggccggtggcggctcaagtaggcgtgagaacttggccgccgtctgtcgcgcttgtaatgccaagaagaaaagggagttattttatgcatgggccgggccggtgaagtcccaggagactatcgagagggtgagacagcttaaagccttcaaagactccaagaaagccaagatgtttaagaatcagatccgacgattaaatcagaccgaagcagatgaaccgatagacgagcgttctcttgcatccacttcatacgccgcagtcgctgtcagggagcggttagaacaacattttaacgagggtctggcacttgatgataaatcccgagtggtactggacgtgtatgccggcgctgtgacaagagagagtcgccgggcgggcgggatcgacgagcggattttattaaggggcgaacgggataagaaccgattcgacgttaggcaccatgcagtcgacgctgcagtgatgacactgcttaataggtccgtggcactgaccctggagcaacgtagccagctgcggcgcacattctatgaacagggactggacaagctggaccgcaatcaacttaagcctgaagaggactggagagatttcaccggcctggcccctgcatcccaggagaaattcttggagtggcggaaagctgccacaattctcggagacttgctggctgaggcaatagaagatgacagcattgcggttgtatcaccactccgccttagaccccagaacggatctgtgcaccttgaaaccatatccgctgtgaagaagcagacactcggttccgattggccagccgatgccgttaagagaatcgtggaccctgaaatttatcttgccatgaaagacgctctgggcaagctgaaggagctcccagaagactctgcacgaagcctggaactgccagatgggcgcttcgttgaagccgacgacgaagtcttgttcttccccgagaacgccgcatctattctgacacctcgcggggttgctgagattggtgggtcaatacaccacgcacggctctacggctggctgaccaagaagggagaactgaaggtagggatgcttagagtctacggggccgagttcccttggctgatgagggaaagtgggagccgaaacgttctgtccatgccaattcaccggggcagtcagtctttcagagatatgcaagatacaactaggaaggcggtggagagcggcgaagccgtcgagttcgcatggatcacacagaatgacgagctcgaatttgacccggatgactatatcgcccacggcggtaaggacgaactgcggcagttcctcgggttcatgccagagtgccggtggagagtcgatggctttaagaagaattatcagatcagaatcagaccagccatgctgtcacgagaacagctgccatccgatatacagaggcggctggagtctaaaacactgaccaagaatgaaagcttgctgctcaaggctcttgacacgggactcgtggttgcgatcggcggacttctcccattagaaaccttgaaggtgatacggcgaaacaatcttggatttcccagatggcgcggcaatggaaatcttccgacatcttttgaggtacgcagctccgctctccgagccctgggagtagaaggtcctaggggcggcggaggcagctaccc

SEQ ID NO: 1795 - DNA, 4479 bp, synthetic construct
  source 1..4479: mol_type = other DNA; note mammalian_codon_optimized_tethered_system_MG160-4_H230R_MG3 -6n-L881
tgccaagcttccgagctctcgaattcccaccatgaagaggaccgctgatggttccgaatttgaatctcctaagaagaaacgaaaggttatgtcaacggacatgaagaactatcgtatcggggtcgacgtgggtgatcgaagcgtaggcctcgcagcgattgaatttgacgatgacggactgcctatacagaaactcgcattagtcaccttccgtcacgatggtggtctggatcctactaagaacaagacccctatgagtcgcaaggaaacgcggggaatagccaggagaaccatgcgaatgaacagagagcggaaaagacggctccgtaacctggacaatgttttagaaaacttgggctactcagtcccggaaggaccagaacctgagacatatgaagcctggacctctcgggctctgctggcatccattaagctcgcaagtgccgatgagctgaatgaacatttggttagagcggtcagacatatggctcgacacaggggatgggccaatccgtggtggtctttagatcagctcgaaaaggctagtcaggagccaagcgagacattcgagatcatcctggcacgcgctagggagctgttcggagaaaaggtgcccgctaaccctacattaggtatgctgggcgccttagcggctaacaatgaggtactgcttcgacccagggacgagaagaaacgaaagaccggctacgtgagaggtacacccttaatgttcgcgcaggtcaggcagggagatcagctcgcggagctccgtcgaatctgcgaagttcaagggatcgaagatcaatatgaagctctgagattaggggtgttcgatcacaagcacccttacgtccctaaggaacgcgtcggaaaagacccactgaatccgagcacgaaccggaccatccgggctagtttggagttccaggaatttagaatattagattccgttgctaacctgagggtgagaatcggctcccgagctaaacgggagcttaccgaggcagagtacgacgcggccgtcgaatttcttatggattacgccgacaaggagcagccttcctgggctgacgttgcagagaaaatcggcgtacctggtaacaggctggtggcacccgtgttagaggacgtgcagcagaaaactgctccctatgataggtcttccgcggcatttgaaaaggcaatgggaaagaagaccgaagccagacagtggtgggaaagcactgatgatgaccaactgcggagtctcctgattgctttcctggtcgacgccaccaatgataccgaggaagcagcggcagaagccggacttagtgagttatataaatcatggcccgccgaggagagggaagcactctctaatatcgacttcgaaaagggaagagtggcctactcacaggaaaccttgagcaagttgtccgaatacatgcacgaataccgagttggcttgcatgaggccagaaaggctgtctttggggtcgacgatacatggcgcccaccacttgataaactggaggagcctacaggacagcctgctgtcgaccgcgttcttacaatactcaggcggttcgtgctggactgcgagcgccagtggggtcggcccagagccatcaccgtcgagcatacaaggactggattgatgggaccaacgcagcggcagaaaattcttaacgaacagaagaagaatcgggctgacaatgagcgtatccgcgacgaacttcgggaaagcggggtagataacccatcacgggcggaagttcggcgtcatttgatagtgcaagaacaggagtgccagtgtctgtattgtgggacaatgatcaccactaccaccagtgaactggacgccatagtgccgcgggccggtggcggctcaagtaggcgtgagaacttggccgccgtctgtcgcgcttgtaatgccaagaagaaaagggagttattttatgcatgggccgggccggtgaagtcccaggagactatcgagagggtgagacagcttaaagccttcaaagactccaagaaagccaagatgtttaagaatcagatccgacgattaaatcagaccgaagcagatgaaccgatagacgagcgttctcttgcatccacttcatacgccgcagtcgctgtcagggagcggttagaacaacattttaacgagggtctggcacttgatgataaatcccgagtggtactggacgtgtatgccggcgctgtgacaagagagagtcgccgggcgggcgggatcgacgagcggattttattaaggggcgaacgggataagaaccgattcgacgttaggcaccatgcagtcgacgctgcagtgatgacactgcttaataggtccgtggcactgaccctggagcaacgtagccagctgcggcgcacattctatgaacagggactggacaagctggaccgcaatcaacttaagcctgaagaggactggagagatttcaccggcctggcccctgcatcccaggagaaattcttggagtggcggaaagctgccacaattctcggagacttgctggctgaggcaatagaagatgacagcattgcggttgtatcaccactccgccttagaccccagaacggatctgtgcaccttgaaaccatatccgctgtgaagaagcagacactcggttccgattggccagccgatgccgttaagagaatcgtggaccctgaaatttatcttgccatgaaagacgctctgggcaagctgaaggagctcggtacctctggcggcagcagcggcggctcaagcggaagtgaaacacctggaacttccgaaagcgctacgcctgaatcttctggtggatcttctggcggatcttccgttacccagaagtggacccatcgataccagttgaaacccggccgatgggtttttgcccccacagatgaggccaagaagtgcggtgctcacattaagcgcagcgtggcttccaggtggaaggccccaaacttctactatcacctcagaaatggcgggcacgttgcggccgtacggtcccacgaactgagccggtttttcttccgggcagatttggacgatttctttgggagagtgaaccggtcccgcgtgacccggtgccttaaaccttggttctcatacgccgaagcaagggagatggcctcagaatctgtcgtgaagcgacctggagagacagcctttgtgctgccgtatgggttcgtgcagagccctatcctcgcatccttggccctggacaagagtaaactgggtagcctgctgagatcactggacgggggccgcgatttcacggtgagcgtctatgtcgacgacatcattatctctggagatgacgaagctcaacttaaagaggtagcatcccgccttgagagagtggcgagtgaggccctgtttccactcagcagtggcaaaactcagggacccgcctctggagtgactgtttttaacatagaactgtcccatagaatgctcaggattaccgatgataggctcgcttcactgaggctcgactatcaggcgactgcatctgagaggtgtaaagctggcatcgtgtcctacgtatacagtgtgaatccagatcaggtcgctcaagtgacaagcggcggcagtagcggcggcagttctggatctgaaacgcctggaacatctgagagcgccacccccgagagcagcggtggatcttctggtgggtcttctggtaccccagaagactctgcacgaagcctggaactgccagatgggcgcttcgttgaagccgacgacgaagtcttgttcttccccgagaacgccgcatctattctgacacctcgcggggttgctgagattggtgggtcaatacaccacgcacggctctacggctggctgaccaagaagggagaactgaaggtagggatgcttagagtctacggggccgagttcccttggctgatgagggaaagtgggagccgaaacgttctgtccatgccaattcaccggggcagtcagtctttcagagatatgcaagatacaactaggaaggcggtggagagcggcgaagccgtcgagttcgcatggatcacacagaatgacgagctcgaatttgacccggatgactatatcgcccacggcggtaaggacgaactgcggcagttcctcgggttcatgccagagtgccggtggagagtcgatggctttaagaagaattatcagatcagaatcagaccagccatgctgtcacgagaacagctgccatccgatatacagaggcggctggagtctaaaacactgaccaagaatgaaagcttgctgctcaaggctcttgacacgggactcgtggttgcgatcggcggacttctcccattagaaaccttgaaggtgatacggcgaaacaatcttggatttcccagatggcgcggcaatggaaatcttccgacatcttttgaggtacgcagctccgctctccgagccctgggagtagaaggtcctaggggcggcggaggcagctaccc

SEQ ID NO: 1796 - DNA, 1014 bp, synthetic construct
  source 1..1014: mol_type = other DNA; note = mammalian_codon_optimized_MG198-1
atgaaggccctctggcagtggttgcagacaagagctgggatcgccccacgagaccaggctactatgacgtgttatgcacctccaaagacaccccagactgccgcccccttggacatagctagatcagacgcaatggcagtggcccctcctgttactagaagccagccgccagagcgcctgtttacccacgccgctctccatcaggcttggcgtgccgtgaaacaggcaaagggagggccgggagtagatggggtaacgatcgcccagttcgaagctcgactcgatgaagagttgatggccctccagaaggaactgaccgccggggcctataggcctcgtccacttagacaggtccttgtacccaaagcaggagagggaatgagaggattagcgatctgggctctcagagacagggtggcacagcgagtcgtatatgacctcatcgcacccgtgttcgagccccacttcctcccctgtagctttgggtataggcccggattgggtgttgagcaggccgttcaaagagttatcgatcatagaaacgcaaatctgaggtgggtagtggatgccgacattatgcactgctttgatgcaattgattctaggagactcttcggaatggtgcggcagcgtgtcagagaccggctggtgttacgatacatcgagcagtggcttcaagtacagctgctgtcaagcttggacggaaaaccaagacgggccggcgcgtcacagggttctgttttatcacccctgttggccaatatctacctgcattctttagaccaagcactgacagccaggggactcgctttagtccgatatgcagatgattttgtcatctgctgcaggagaagagccgacgcccaaagcgctttgtctcaggcacaggccgctctgcaacgccttggccttgaactgcatccacagaagactcagattgttcattttgatcaggggtttgcatggctgggccatttttttatccgaaatgaatgccacagattggccggcgga

SEQ ID NO: 1797 - DNA, 867 bp, synthetic construct
  source 1..867: mol_type = other DNA; note = mammalian_codon_optimized_MG198-2
atgaggaatcgctcacccttcgttccttggcagtcagcctttagcgtggacggactcagaagggcatggctggcagtgcgggccgccaagggaagaggcggctctgacggaaagactctggccgagtttgagcgacgtctcgacgctaatttgaacgagttacgcgaagaactgataacgggaaagtacagaccacacacggtcacacaaatcctggttccaaagcctggaggcaagtggcggcctctgaagctgtggacagtgagggacaaggttgcacagagggccgtttataattatctcgagcctgtgttcgaggcgcggtttcttgactgtagctatgggtatagacccggtcgatctacagcggacgcaagtagagccgtgagtaaggccaggcaggagggggccgtttgggtcctggacgctgacattaaggattgttttgaacgcatgaggggtgatttagtgatgcagcgcctggcacgctggcaaactccacggcccgtgcgagagttagtgcgacactggcttaacgctagaatctggaacacttgggagggaagcccaagtaccgctggaactagtcagggtggtgtcatttctcctttgctgtgcaacttgtacttgcacccctttgatcaagcaatgcagaagaagggtatctatcttgtcagatttgctgatgacttcgtggttctgggccctcaccaaccggctgtgcggtgggcacagcgtcgcgccggcgccaagctcaaagggcttggcctggagatgaatgcccataagactcggatcacatccttcgaagaaggatttcagtttgttggatggttctttattagagatgaggtgtatcagctgaaa

SEQ ID NO: 1798 - DNA, 954 bp, synthetic construct
  source 1..954: mol_type = other DNA; note = mammalian_codon_optimized_MG198-3
atgaatccccggcgttggtgggagcgaatcagagagattggctcaaccgctgtgccagaggatccctctggacagcagcgagaacgcaggagatttagaggccaccgtaggcagcctcaccatcctgcattcacccccgatgctgtgcaccgcgcctggcggcgagtcagggcgaacggtggaggggctggcgtggacggagtctccatagctgctttcgagaaagatctcgaaaatcaattggaaagtcttaggcaggaactcgctacctctacttaccggcctagagccgtgaggagggttttcgtgcccaaacccaatgagggactgcgacccctcgctatttgggccctgcgagatagagtcgcccaaagagccatgtacgactacttggagccttttttcgagcctgaatttcttggctgttcacacgggtttcggccaggacgctctgtggacactgcagtacatgcagttctgtctgcacgggacgtcggcttgcgctgggtcctggatactgatataaaggactgcttcgattccattgatgctaaacagttggtgaaacaggtgaagcacagggtgaaggaccggacaattctgagactgctcgatcagtggctctcagccgacatcttggacgctaggggaagacacacggctgcaggcgcggctcagggcggggttctttcccccctcctctgcaatatatacctgcacccctttgacgttgcaatgaccagaaggggtgtgcatcttgtgagatacgctgatgacttggtgtgcttatgccgtaggaagagggaggcccagcaagcacacaggcttgcgcagcagagcctttcccctctgaagcttgagttgcatcctcagaagactcgaattgtgcactttgaccaaggattcaaattcttaggggtctttttcgtgaggaacgagcacttttatttatct

SEQ ID NO: 1799 - DNA, 882 bp, synthetic construct
  source 1..882: mol_type = other DNA; note = mammalian_codon_optimized_MG198-4
atgcttattttgtccctcttacgactcttgggcttgtttcaccggagaagccccagtttaagggatcagctgctcgacatggctaaccttcgccaggcatgggaggtcgtccggacccgccatcaggggcctgagccatatgcccgctacattgcacgttttgggaggcgccttgatactaatttgcacgcgctgcgccgcgctgtgtccaagggcaattatcgcccaaggccatacaggttcatttttgtccccaagtctgatggcgggctgcgtcctttggccgtgcctgctgtggaggacctggtattgcagcgagcactttataatgtaattggtccgatatgggagccctatttccttgactgtagcttcggatttagaccgggacgcggggtggaggatgccgtcatgagagtggccgcttatcgcgatgagggctatcgttgggtggtggatgcagacattaaacgttgcttcgaaagctttgatcacaagattctgtttgcactgctgaggagacatattagagatgccttcatcctgaagttgatatgggcttgtgtcgctgctggcggcaatgggagaagaggtatgggcgtgccacagggcgcacccatcagtccattactgtgcaatatttatctgcatgagttcgatcagaggatcgtgacacgctttccacggctggtgagatatgccgatgatttcgtcattctgtgcagagacatggaagaggctcaacgagctctcgaagaggcacgcctcgccctggaggccctccggctgtcactgcatccgcagaagactcgaatcactcattttcgcctggggttcaaatttttaggggtcttctttctcggtgatcgcatctatcccctt

SEQ ID NO: 1800 - DNA, 888 bp, synthetic construct
  source 1..888: mol_type = other DNA; note = mammalian_codon_optimized_MG198-5
atgggatggtggcgtcggaagcgtaccaaagaggggaagagacaggcggaagccctcttttcaccggaagcattgagacgggcatggcaggtcgtccggaggaagggggccacccctggtgtggatcgagtcacaatccgccaatttgagcgcaaccgggatcgtaatctggcccagctgcggcaagagctggtgggagggacctatgcccccctgcctgtgcagcgtgtactggtccccaaaagtcgggggggcctgcgacctttagcgatttggacccttagggatcgcgtggcccagcgagtagtccatgactatctggtgccaatattggaaccccatttcctggattgttcatacggctttcgccccgggcgaagtgtcgcagacgctgttcaagcaatgatcgaagcccgcgatgcaggaaggaggtgggtggttgatgctgacattgaagattgttttgggagcctcgatccacggcgtctcgttcgtcaggccagagcctgggttcctgaacccctggttgtcgggctgattgagaagtggctcagagcaagagtctataatcccgccagaggtcagccggctaccgctgcagcttcccaagggggagtgatcactccccttctcgcaaatctttatctgcatagttttgatgtccaggtcaccaacgtggttagttacggcactttagttcggttcgctgacgattttgtgatcctgtgccagagaagacgggaagccggtaccgccctggccgcagcccgtcaggcattggggagagtaagacttaggttgaacccccataagactcggctggttcacttcgatcagggtttcaagttcctgggtgttttcttcttgcgaaacgaacatttttacctg

SEQ ID NO: 1801 - DNA, 870 bp, synthetic construct
  source 1..870: mol_type = other DNA; note = mammalian_codon_optimized_MG198-6
atgccagttggaagtctcttacagagaagagagtcaccagggcgattattcagcatgaatgccatgagacgcgcatggaatcaagtaagacgggggggcaagagccctgggacggatggcatgacattagatgccttcgaagcaaggcttaacttggagctgaaccgtttgcgacagcaaatcatcggcggaacataccagcctcaaccagtgagacaattcttcatccctaagaggagtggcaaacttcgccctattcaggtttggtccgtgagggacaaggtggcacaaagagcagtagtaaatattattactcccctgctggaggcccagtttctcgagtgtagttacggctttcgacctgggcgtagtgttggaatggctgtcgatgcagttacacagggccgcgatacggggtatggatgggtccttgatgcagacatctcagactgctttggtgctatcgacctgaagcttttgatggggcaggtcgagagactcatcgacgaggaaccggttgtgcgcctcatccagcagtggctccacacccctgtggatggggaactcggtatcgtggcaggagtgtctcaggggggagtgatcagccccgcgttggccaacttgtatctgcaccgctttgaccagatgatgctcgcctctctgccacaaagcaagttgattagattcgcagatgattttattacccttaatactagtgaagaggcagcaagctggtctcttgacgtggcaagaaggtccttggagaacctgagattgcagctcaacatgaggaagacacggatcgtccgattcgacgaggggtttacatttctgggctatcagtttaataagaacatcgtcgagaagggc

SEQ ID NO: 1802 - DNA, 891 bp, synthetic construct
  source 1..891: mol_type = other DNA; note = mammalian_codon_optimized_MG198-7
atgtcccctcataaaatggatacggatcctcccccagagcaattgtttagtctggcagccctgcatcgtgcctggaggctggtccgccgcagtggaccctcagctggaacagacagagtcactccacacgaatttgagcagaggctggaagacgaattaacccagctgcgccatgacatattaagtggacagtatcgacctaaaccagttaacagattctacctgccaaagcctaacggtagacgccgcccaatcacgttgtggtcagtgcgagatcgggtcgcccagcgggtagtgcttgattatctgacacctatccttgagaatgtctttctcgattgcagctatggcttccgcccgggacggtcagttgctgacgcaataggggccgtgattcaggcacgagacaggcaccttagatgggtggtcgatgcagacatcactgcctgttttgatagcatacctcctgagctgttattgccccaggtgagatcacttgtgtcctctgtcgttgtgatgcgattaattgagcagtggcttaacaccccagtgtataagcacgcccatatccgagccggtgtgtcccagggtggcgtgataagtcctcagctcgcaaacctttatctgcataggttcgaccagatgatccaggcagccttgcccgaagtcactctcgtccggttcgcggacgacttcgttattttgtgcaggcgtaagagagaagcatggtggagtctcactgtagcccagcgtagtctggggaatttgaagttgtacctcaatatggagaagacaagggtgactcactttgacgaagggttctcattcctcggtgtgaccttcaaaggggggtggcactccccgctgccaggtcatcctagcatcacggaa

SEQ ID NO: 1803 - DNA, 999 bp, synthetic construct
  source 1..999: mol_type = other DNA; note = mammalian_codon_optimized_MG198-8
atgtctgatcttattaagaatctcataactatccccaacctggaagccgcttggcagagagtccttgctaacggcggctgtagaggtagcgacggcattaatctgcagcgttttgggttcgatctgatagatcacctgagagatcttagccatagcttagaacacgggtattatcacccgtatcccctgcttcggttccccatccccaagaaatcttctcaccagctcagtgttgtcagtaatcagtccgcccctctgaaccccgaccacagatcattacagaccgcccaccgttttctgagcgtacccacagttcgagatagggtcgcgcagaccgcagcgttcctggttactaaggagatttttgaggccgagtttgaggatgtgagccatgcctaccgtgaaggacgtggggtcaggaccgctgtttatgatataaaagaatggcgggacaaaggatatagatttgccgtggatgcagacatcacagcttattttgacaacgtcccccatgatcctctgttagctaggctggaaaaattgattccagatcccgccatgcttagactgttcgagaagtgggtgaaggtggaggtatatgatggtaccaagatctggaccctggataaagggatcccgcagggctctgttgtcagccctgcgttggcgaatcttttcctcgatgtactcgatgagacacttatgtcttttggcatgaagttagtgagattcgcagacgatttcctgatccttgctaagaccgaaaaagccgccgaagatgcaattgaattgaccgatatgttgctggacgacatgcagatagatcttaatccactgaaaacaaaaatcgtgtcatttgataagggttttaagtttcttggggctattttcctgggcgacgggatctttctgccttttccccagaaacgagagcagggtcctccgccgaagctgcccccccctctgaccttgaggcgatatttagaactgaaaaacaag

SEQ ID NO: 1804 - DNA, 927 bp, synthetic construct
  source 1..927: mol_type = other DNA; note = mammalian_codon_optimized_MG198-9
atgctggatgagatcctggctagggacacacttaggcaggccttttggcgagtaagggagaaccacgggtgtaggggggccgatggcatgactgtgcacgggtttgaagctgacttggacagggaggtggatcgactgcaagatagactgctgcggcgatgttatcaccctttcccactgttggagatagccgtgcctaagagatctggaaattctcggaggctgtgcattcctacagtacgggacagagtcgctcaaacagcgatggacttggtggtacgtcccgttttcgaagccgagtttgaagactgtagctacgccttccgccgcggtcggagcgtgcgggatgccgtccataagatttgcgagctccgggagcagggttatagatggctgctggacgctgacatacatgattgcttcgactctatcccgcatgatcgccttctcgccaggctggcggagctgccgctggatgaagacgttttgaggttgtttgaatcctggatcagaactgaggtgtatgatggcaggcgactgcacacccctggatgtggtatcccacagggaagtgttgtgagcccactccttgctaatctgtttctggatcagcttgacgagacattcatgctcttcgagcaagtggttatccgttacgccgatgatttccttgtgctctgccgcgacagggatcgcgctgaaggagccctggaggtcaccgacgctctgttagatgggctcggcttgacattaaatagagcaaaaaccgccgtgacgagcttcgaacacggattcaagttcttaggtgcgctgttcgtggaggatgaagtttatctgccctactctaggcacaaggaagagacccagccgccatccctgccgatgcccctggacctgtggacataccttgagttaaaacacggaggc

SEQ ID NO: 1805 - DNA, 933 bp, synthetic construct
  source 1..933: mol_type = other DNA; note = mammalian_codon_optimized_MG198-10
atgagaattaatgtcaatagtgtagcaaatcggaactccctggtttctgccttccagcgggttaaggagaatcatggctgcgctggagtagatcgtgttactattgagtcattcgaatctgggctgaatcgtaatctgagcattctgcttcacgaatttgagagcaaaacctatagcccactgcctcttatcaagattctcgtggataaaggtaacggggaagccaggaagctttgcatcccagctgtacgggacagagtcttgcaggctgcggtgctgtgcaatattggtccaattctggagaaggagtttgaggagtgctcttttgcctatcgaaaagggcggtcagtcaggcaggcggtttacaggattaagggctattacgatgaaggctacaggtgggtcgtggacgccgacatagatgcattctttgactccgtcgatcatgagcttctgatagccaaggtcaaaggctatatcaaggacaaggacatccttggtctgatagagctgtggattaaggccgaagtttgggatggagagtctgtgaaagtcatcgataagggtatcccgcaaggctcccctatatcaccaatcctcgcaaatctgtaccttgatgaactggatgaggccatgctgaagcaggggtacaaatacgtgcgctacgcagatgattttttggtgctctgcaagaccgaggagaaggccaagcagtctctggagttcaccgacgagattttagataagatgttcctggagctggatgaggctgatgttgtctcatttgatcatggctttaaatacctgggcgtgatatttgtgaaatcactcattatgacaccatttaacaagcccaagagagaacgaaaggttctgttcatgccgcctccgctgaatatggccacgtatctcctcaaaaagaaaaaaggatgg

SEQ ID NO: 1806 - DNA, 945 bp, synthetic construct
  source 1..945: mol_type = other DNA; note = mammalian_codon_optimized_MG198-11
atgaataatacaaatgagttcaacatctcatttcaatccctttttactgcattccaggctgtgaaagagaaccatgggtgcgcaggtgccgaccgtgtcaccatagaacagtttgaaggcaacttggacattaatctgaggattatgcaaaaggaacttgttgagcagacatattctccactgcccttgttgaaaatcctggtggacaaggggaatggcgaggccagagccctctgtatcccaaccgtcagggaccgagtcgtgcaggctgccgtgttacaaataattgagccaatcctcgaaagagagtttgaagagtgtagcttcgcctacagaaagggcagatcagttaaacaggccgtatacaagattaaggagtattacgaacaagggtaccactggttggtggacgcagacattgacgcatttttcgattccgtagatcatgcacttttacttgaaaaattcaagaagtacgtgtccgatttgtacatccagaagttaatcgaactgtggctgaaggccgaaatatgggatggcaaatcccttatcgttccccaaaaaggcatcccacaggggagccctatctcccccatattggcgaatctgtttctggacgaactggatgaagctttcctgaagaaagggtacaagattgttaggtatgcggacgattttatcattctttgcaagaagccagacgaggcaatgaatgcacgccagctctctaagcagacattagagaagctccatttgcagctggacgaggagcagatcacctccttcgaacaggggtttaagtttctgggagtggtctttgtaaggagcatgattatggtgcctttcgacaggccaaaaaaggagagaaaaatactcttttatccaaaacctctgaacctcgacgagtatttccttaagaaaggaatcactagcccgctgaatcgg

SEQ ID NO: 1807 - DNA, 954 bp, synthetic construct
  source 1..954: mol_type = other DNA; note = mammalian_codon_optimized_MG198-12
atgagtgacatgtcactcttcgagcgtattgctaccgttgccaccctccatgccgcttttgcaagagtacgagacaaccatgggtgtgccggcgcggacggagtgagcatcgctgagtttgaacgcgatcttgatgtcaacttattcgctctggcagaagcattgggcagtggaacttataggtcttttcccctgctgcgaatactcgtcgcacggcccgatggcgccgccaggcagctttgcatccccaacgtacgggacagggttgctcaggccgcagcccttgctgtattgagcccactttttgaggcagccttcgaggcctgtagttttggttatcgaagggggagaagtgtgcgcgatgctgtacgacaaatcaagcagtactgtgagcagggatacacttggattgtcgaagccgatattgatgcctactttgacacaattgatcatgcacttcttcttgccagagtgcgaaaactgatcgatgaggaaaggattgtccggttaatcgaacaatgggtgcaacctcaagtgtgggacggatcacagttataccgattagaacgtggcatatcccagggaagccctatcagcccagccttggccaacttattccttgacgacctggacgaagcactgctggctgccggccagaagttagttcggtatgctgacgactttgttattctgtgcaaagatcacggacaagcagaacgggctgcaaggcttaccgatacagtgctcgactccttgcacttggagctggatgatgtggccatcactagcttcgatgccggtttcacttttctcggagtaactttcatgagaagtcttatcctggaaccatatgatcggcccaagcacgagagaaaggtgctgtttatgcctccttgcctgaatcctactgaattagatcgcctcatcactgagggggcaggagcacgacgcgag

SEQ ID NO: 1808 - DNA, 936 bp, synthetic construct
  source 1..936: mol_type = other DNA; note = mammalian_codon_optimized_MG198-13
atgttgagccaggtggcacaactggccaacctccacgcagcattcggtcgcgtcgcagaggcgagaggcggggcaggcgtggaccgattaacaattggggcctttagaaagaaccttgatctcaatctggcgagtttagcaagcgagctgaccagcgcaacttaccaaccccttcctcttctgcgattcctcgtggccaaacctaatggtagtccgagggctttggtgattcctgccgtccgcgaccgagtggcccaggccgcagcacttaacattttggaacctatatttgaggcccgattcaaggaggtgtcttttgcttatcgtaaggggaggagtgttaaacacgcagcactccgcgtaaaggctctccgggataagggttaccggtacttgctggatgccgatcttgacgatttttttcaccagatcgatcacgaaaggctttttgctaggttatctcaaatcgtgcctgacccgggtttgttgaggttactgcggctgtgggtgagggccgaggtttatgacgggcgccaggtctacattatggagaaaggactgccacagggagcggttatttctccactgttatccaatctgtttttggacgagttcgacgaggccctgttagcccgcgggtttcaactggtacgctatgccgacgactttcttgtgttaactaaaacccgcgccgaggccgaagcagccctccacgcatcacaagaaattcttaccagactgagactgagcctggatcccgaggacacccaaattacccacttcgatgaaggattcaaatatctgggcctgatctttttcaaagatgcaatcctggcaccttttgacagagcacccaaaaagaatcagattctctacatgcctcctccatttgatctgaaggcatatcttgctaggaagaagagcccaagcctgagg

SEQ ID NO: 1809 - DNA, 930 bp, synthetic construct
  source 1..930: mol_type = other DNA; note = mammalian_codon_optimized_MG198-14
atgtggattctgggcggaatgcggacccgggcccagtccagcacagacagaaagccagtctctaggaaagttggtgcggtccagggagggctccatcgcaggatgtttgcgatggagtgtcttcgtgaaggatggagacgagtgcgcattaatggggggggtgccggcggagacggccaaactttggaagattttgcccgccgcctggaggaggagttgcgccgattgcacgcggaactgcagagaggcgcctacaggcctggcccattacggccagctagaatgccaaaagccgatggaagttggcgaccgttacggatcccatgcgttagggacagggttgtgcaggctgcctgtcagatgcagctgctgaagaggctcgatggtgcccaacatgaacgttcattcgcatatagaccggcaagaagtgtcgaaatggctctcgctagactgagacaagatcttgaagagggccatgtctgggtcgtggacggcgatattgagaagttctttgacaatgtcgaacacgccaggttgttgaaggaactgaaaaggttggggctcgaaagacgggtcagaagactgatcgggttgtggctgtccggctttggagccggcggccgggggctcgcccagggttccccagtctcccctgtactggcaaatgtgttccttcatccggttgatgccgcactccaggcccacggggtgcgtttcgttcgctacgcagacgactttgtattggcttgtcgcactcggagagcagccgaggacgcttggaggcttgccgtccggcttcttgcgggtcgaggtctgcggctccatgccggaaaaactcgaatcgtgcccgccgcagaaggattcgtattcctggggcaatgggtgcgattaagagtggagatgaccaaagtgaaaacaaaaggccgcgag

SEQ ID NO: 1810 - DNA, 885 bp, synthetic construct
  source 1..885: mol_type = other DNA; note = mammalian_codon_optimized_MG198-15
atgtccgtctggcagtcctggagacaagtgttccggagccaaagacggatcagggtgtacgagggcacgagattagaggacatcgccagattagaaactcttgcagaggcctggggcagggtgcgctctaataaaggaggccctggggtggacggcgtatctattgccgatctggcaccggcaattgaggccagccttgaagcgttgtcagctgcactgctggcggagacataccgaccccataagctccgccgagcttttatacgaaagcctgacggcggcaggcgcccattgtcaatcccggttctgatcgaccgcttggctcagacagctgctatgcttgccttggagcctgaaatggatgcccgtatgtccgaaaccagcctggcttatagagtcggacgcggaccgccccaagctatcgccgcagtggaacgcgctttcgctgaaaagctggtgtggacgcttgacgcagatattgagcggtattacgatcggatttggcataggcaattgatgacagacttggcaatctggattgacgatgagcgaatcctgcgcctcttgctgcgatggctgaggacgtttggttggagggggcggggtgtcgcacagggtgcccccatttctccgcttcttgcaaatctgtacctgcatccattcgaccgcctgatggctgtggccgggtggaggatggtcaggtatgctgatgacttcgttgttttaacaagaagcgaggctgaaacaaaaagggcttttaaggacgtagaacgcttgctgcgaggtaggggcctggccctgaataaggacaagacacgaatcgttcctcctggtgagggcttcagatttctcggacagaacctgactgccatcgggggcctggtt

SEQ ID NO: 1811 - DNA, 807 bp, synthetic construct
  source 1..807: mol_type = other DNA; note = mammalian_codon_optimized_MG198-16
atgctcgataccattacaagccacgcccgcctccatgccgcttggcgacgggtgcgaagaaatggcgcagccactggtggtgacggggagaccgccgcccagtttgccgcacgactggaggcacgcctcgaacgactgagggcggatttacgacacggtcgttacagaccagggccgttgaggcgagtggccctcgcgagacccgacggaagaacccgcacccttcgtataccgggactggccgacagggtggtccagacagcaacacaggccgtgctcgcggagcacctggacacttggatgtcccctgacagcttcgggtaccgacccggtcgaagcgtggatcaggcactcgcacggttgagaggccgcgctctggggcagagatacgtgctcgacgccgacattcacgcattttttgattgtgtgccacacgataggttgcgagacgaattgggaatctggattactgaccccagagtccgttccctcctcgaactttggattacgggctttgggggacgtcgcggactggcccaaggtgcacccattagccccttattggccaacatttttttgcatcccctggatgcagcgtttgctcgggaaggcatctcacatgtgcgctacgcggatgacttcgtggccctggcacgtgatagaagagaagcgcgtgcagctcggcgcctggcagcaggagtgctcgctagacggggattggagctgcaccccgataagacagccattagacccctcgcagagggcttgacattccttggtgagaggttgatattcgagacggggccc

SEQ ID NO: 1812 - DNA, 852 bp, synthetic construct
  source 1..852: mol_type = other DNA; note = mammalian_codon_optimized_MG198-17
atgccaggcagcttggcacgagccatgacaggaatcgccgacgccggcactcttcatcaagcatggagaagagtgagggccaaccagggggggccagggggggacggcgagtcaattgctgcatttggcgtggccttagacaggcagctcgaaacccttgcagctgagttaatatctggcaggtataggcctgggcccctccgccgcgttgctattcccaagcccgacgggggacagcgattactcgcgattccctgtgttcgcgacagagtggcacagactgcagccctgctcgtgttgcagcctgtcctggaaaccctgcagtcagatgcctcttttgcttacaggcccgcccggggcgttgctgacgctctggcttccgtcaggcgagcacatgctcgcggacttgtgtggactctcgaatctgacatcgctcagtgtttcgactcaattccacacgcgcggctgatcggcgagctcaccatctggatccagtctgaacgcaccctgagactgatcgcaacttggctggaagggtttagcagagatggcaggggcattgctcagggcgctcccatcgcaccactcttggccaatctttacttgcatcctttggatcgcctgttggtggcggctggacacacccctgtccgctacgcggacgacttcgtggtgctcaccagggacaggcacgaggtagagcacgcctccgggttggctgaaggtgtgctcgtcgagaggggccttgccatgaagcccgacaaaaccagaattgttcctcctggcgtcccattcagatttctgggtgaggtattgagggccccagcgagggccgggctgcggttgcttcgt

SEQ ID NO: 1813 - DNA, 870 bp, synthetic construct
  source 1..870: mol_type = other DNA; note = mammalian_codon_optimized_MG198-18
atgggtaagctgctctcacgcgccgtctcccccgaaattatgaatgtcgcttggaaaaggctgaggggagacaatgcagtgtggcgatccggagtttcccgctctggcatggaacgcgacttagtgtatcacctccttaaactgagcgacgaactgcggtcaggagattatcttccggatcctgtcaggttcttccctgtgaataagggtgatggaaaacaaagaattatctctgctctcactctgagagataagatggcccagcggaccgtcctctcagcattagagcccctgggcgagaagctctttcaccatgattctttcgcctacagacctggaagaacaattgatatggccctgtcccgagtcagggagtacatgctgtgcggtctgaactgggtggtagatggcgatattcagggctttttcgataacatcccacatggtcccctggttaagattttaaaacttcatattccagacagggagatggtttccctgattaagagatggcttgaggtaggggccgcaaagcggggatttatgtctgcctctcgcggcattcctcaaggggccgttctcagcccatttcttggaaatctgtacctcacctcttgggataacgacctggccgctcacaatttgcctttcgttagatttgctgacgattttttggtcttcgcaaaatctaaagacgatgctcagagagctatggcttacgtggagaaacgcctgaaacgtctggggctgatcctcaaccctcagaagacccgtgttgtggcctgcggaccacatgttacctttttagggagaaaattgcccagattgaagagtcaaaatatctccgcgcatcctgagagacagaagagc

SEQ ID NO: 1814 - DNA, 837 bp, synthetic construct
  source 1..837: mol_type = other DNA; note = mammalian_codon_optimized_MG198-19
atggctcggttactggagtctatgctctcacctgtcgtcctggataacgcttggcgacgactcaggggagaccagaccgtctgggcaccggggcttagtcgggctgagatggagagacatgccctgaagcatattcttgagttggttgaggaggtcagatcaggcaattaccgacccgcaggcctgagaaggtttactgttcgcaaaccaaacggaggtcgaagggttttatccgcgctgactttaagggataaactgttacagactgctgcactcttggtgcttactcccgtagcggagaggcgtttccacccggattcatacggctaccggccaggccgcagcgtggaaatggctttcgggagggcctgcgaaaggatccattgtggattagattggctggtagacgctgatattagaagtttcttcgatgaaataccacacaggccactgcgaaggctcctgagacggtttgtgagggatcgcgctctgatggagctgatggaacagtggcttgccgtgggttacgcccaaagctctctgtttggtacacggaaagggatccctcagggtgctgtgctgagtccgttgtggtgcaacttgtacctggacaggatggatcgcgactgggatcgcaggaacctggcttttgtaaggtacgcagacgactttcttctcttcactccggaccgcaggtcagccgagagggccctcgaatggactggcggacgcctcgcccgcttaggcctcgagctgcaccccgagaaaactcgagtgacccgcactggacctcatgtggtattccttggccggaatctgccaaggcgggtgaaaggt

SEQ ID NO: 1815 - DNA, 843 bp, synthetic construct
  source 1..843: mol_type = other DNA; note = mammalian_codon_optimized_MG198-20
atgctgggtagggatgagctgctggagcaagttttacaaccagatgtcttagacgaggcctggagaagagtcaggaatgagcacaccccctggagcaagggagtagaccgggaccagttggaacagcacttattgctgcacgtgctgtccttggtggatgacctcagaggcaacaggtttagacccgagcctcttaggcaatttacgatccccaagacagatggccggaaaagggtcataagtgcgcagtaccttcgggacaaattgcttcagcgcgcgatattgattgtgctggagcctaaggcagaaaggatgttccatgttgacagttacgcctataggccgaatagaggagtgcaagacgccctgaaaaaagcaagagagagaatcaattgcggccttgactggctggtagacgctgacattcgcagtttcttcgaccaaatcccccagacaccactcaaaaaaaaactgaaagcttttgccaatgacaggactctgctgggtatcatggatttatggttaaaacaaggagcccatcatacaagcttattggggaccgatagagggatcagtcagggggcaattctgtccccactgatgtgtaacctgtatctgcacgagtttgacttagctctcgagaaggccaatatcccattcgtgcggtatgccgacgactttctgctcttcacgtctaataaggcccttgcagaaaaggctctggaccacgtccgtagaatcctggccaagctcgatctcgagctgcatgacggtaagaccagggtggtccgcagcaaccccgatgtagtgttcctgggggaacgattacctaaccctaaacgc

SEQ ID NO: 1816 - DNA, 834 bp, synthetic construct
  source 1..834: mol_type = other DNA; note = mammalian_codon_optimized_MG198-21
atgtcccatcttctcgagcaggcaatgtcacctgataacctgaatatatcttggaggcggctgaagaaggaacacacaccttggagtctgtctgtatcacgtgatgaacttcagcgggatctcctcaaacatctgctggaatgtagacaacaggtcctttccggggcctacaagcctttgcccctgcgccaattccctctgcgcaagcctaatggtaagcagcgtgttatctctgtacagtacctgcaggacaaactcatccagcgggccctgttaactgtcttggaaccaaaggccgaagccatcttccatgaagattcctacgcttatcgcccacggcggggggtcgctctggcagtaaagaaagtgaaagaacgtgtgcgtatagggcaggactggctggtggatgcagacatagaacagttttttgacagcataccaaatgcccctttgattaagatacttaaaaaattcgtgaatgacaacgaagccatgtctttgatcgaactctggcttaaacagggagctcatcatagcagtttgttcggaagccgacggggaatctcacagggtgctgttctgagccccttgttttgtaatctctatttgcatgagatcgattcagccttaacaaaagccaacattccttttgtcagattcgcagacgactttcttctgttcagcaacgccaagaataaagccgaaaaggaacgagatttcgccgaaaagcagctggataagttagggctgaagctgcaccctgacaagacacaggtcgtacggtctcactcacagctccgattcttgggcgaaacacttcctaaccccaacagg

SEQ ID NO: 1817 - DNA, 960 bp, synthetic construct
  source 1..960: mol_type = other DNA; note = mammalian_codon_optimized_MG198-22
atgaagaccagtcttcttgagcaggccatggccccagacgccctcgatgccgcctggcggcgactgaaaactgaacacacaccttggtcacctgacactagcagggatgaacttcaatatcacctgatgcggcaccttctggaatgtcgtgaagaggtcctcggtggcaggtaccgaccgcttccccttaggcagttcccaatgcacaagccggatggaagaattagggtcatctctatccagtacctcaaagacaaactggtgcagagggctatactcaccgtgttggaaccgagagccgaggccctttttcatgacgactcatatgcgtacagacctagtagaaatgtggatcgggcactggacaaagttcgcgaaaggatacgcataggacaagattggttggttgatgctgatattgagaagtttttcgacagcatcccacaccggccactcgtgaagattcttgctgcctttgtggatgatcgaccaaccatgaggcttatagcaagatggctcgatcagggcgctcacgtaaaaagtcttcttagtaccaccagagggatttcccagggggcagtactgtcacctctcttttgcaacctgtacctgcacaggtttgacgcagctctggcaagtgcgaagatccctttcgtccggttcgccgacgattttcttctcttcgcaccagctcgtgagcaagctgataaggcactcgcatacgctgcacgcgagcttgagaggctgggcctgaccatccaccccgagaaaacaagggttgtgagagcttcaagggaggttagcttcctgggccaggccctgcctaaccccactcccgaggtgaagccacctgtgcctgatccaaagagtcgcctgagccacttgatctacacgcctgaccggagaaacattctgtctaggccacgtaagtcccgcgttcctggaggagcacctccaact

SEQ ID NO: 1818 - DNA, 843 bp, synthetic construct
  source 1..843: mol_type = other DNA; note = mammalian_codon_optimized_MG198-23
atgactacacccactctggaagccgcactttcccccgcgaatcttgacagggcctggcgggccctgaacggcgatcaggcacactggcttccaggcttgcctcgtgagcagatggagccacatcgcctgcgctatcagttggcactgatagaggatgttcgggccggacggtatcaacctgaacaaatgcgtcagttcgctattcctaaggctgatggcggccagcgggtcttgtctgctctgtatttgagggacaaatttctgcagagagcagtcatgcaggtgctcgaacctctcggcgaacaactcttccatcccgacagttatgcgtaccgtcccagacgaaatgttgctatggctctgcaaagatgcagggagaggatccgctgtggcttcccctggctggtggacgccgacatcaggaaattcttcgacgagatccctcaccggccattgcttaaagccttcgatgccgttgtagctgatagggccctgagaaagctggtcaggcagtggctcgcgtgtttcgcctctacaaggtcactgtttggtggggatcgcgggatcccacagggagccgttatttcacctttcttgtgtaacctttatctgcatcaactcgaccaagcatggcaaagtgaaaggctcccctttgttagatacgctgatgattttcttctgttcgcacccgatcaggcactggcggaacgcgcattagcgtttaccaagaggcaggtggaaagactgggcttggctctgcatccggagaaaactcaagtggtgcgggcaggcccctccgtggcgtttctcggccagcgactgcctagacccccagcggatccc

SEQ ID NO: 1819 - DNA, 837 bp, synthetic construct
  source 1..837: mol_type = other DNA; note = mammalian_codon_optimized_MG198-24
atgggcgacctgctgcgaaaggccgcgagtcctgagattttgaacttagcctggaagaagctgaagaatgacaaatccgtttgggatgaaggcattagtcgaaacgatatggagaaggacatggtgtttcacataatgaagctgtccaatgacttaaagaccgggcaatatcggcctagccagattaggatgttccccgtcaaaaaagctgacggcaacaaaagaataatttcagcctttacattgcgggacaagctggcccagcgcgcagtgctttcagtcttaaatccaatcggtgagagttatttccaccaagattcctatggataccgaaaaggcaggagtatcgacatgacaatgggtagagtgtacgaatacgttaggtgcggattcgagtgggtcgtcgatgctgatataaacagctttttcgattctattccacacgggaagttgatgaaaataatcaaaaaatactttaaggacgacgaaatggttaatatcttacataagtgggtagacaccggaagtcccaggacagggattcttcagaaacggcgcggcattcctcagggtggggtgatcagcccctttctgtgcaatttgtacctcactgaatttgataactacctgagcaaaaaaaaccttccttttgtgcgttttgccgatgatttcttggtgttcacgaaaaagggtaaggacgcatacagcgcgctggaaactgttcagctcggcctgaagaaaatcgatctcaaaattaaccctgataaaacgaaggttctgcggtccggtcctaaggtggtgttcctgggtagaaaactgccatttattcataacaag

SEQ ID NO: 1820 - DNA, 864 bp, synthetic construct
  source 1..864: mol_type = other DNA; note = mammalian_codon_optimized_MG198-25
atgctgtctctgcgcacagccctttgccagtctgagaatttgggaggtgcattcgccaggtacagacggtacaggggattgtggactccaaacagtcccatgtttaccgtggcatccgctccagtcgtgcccatgctgaggctcgcggatgagctgaggacagggcgatacaggcctatgccaccccacgtcatgtctgtagccaaggcgaatggtgacaggagggaactcagagtgttcgctatacgtgatagagtggcacagcgtgccttactgcaagtgctccaggccaggacggactccgagatgagcccatgcagctatggctacaggcctggccgatccgtcgcaggtgcattggcacggataagaagttttctggatcaaggcctttcttgggtggttgacgctgacgttgaaaggtgcttcgattctatacctagagggcctctcttggaagaggtcacaagacgtttgcatacacctgaggcagccgagctcgtggctcagtgtctcggctgggagagctcagaagaaagaaacaaggtgggcattccccagggcgcagtactggcaccatggctttgcaatgtgtacttgtggcaattagacgacgccatgcacgccgaggatgcggctatggtgaggtttgctgatgacttcgtacttctcagtggggttcgacctagagcagaggccctgctgcagcgatgcgctgaggtcatagagcagatgaggttgcggcttcaccctgtcaagacagccatcatcgatacggctaggccttttagattcttaggccagtggctgatcactactccgctcttattaagaggtcctgccactgatggcggcacgtgcccc

SEQ ID NO: 1821 - DNA, 846 bp, synthetic construct
  source 1..846: mol_type = other DNA; note = mammalian_codon_optimized_MG198-26
atgggacacctgttagagaaagctatgagccctgctgttctggatcatgcctggcgacttttaagagacgaccggggtgtatggcggagagggttgcctaaggccgatatggagagaaacgtaatccgacacgtaggcacattagctgaggacgtgctgtccggacgctaccaagccgaccctatgcggtgtttcgaaatagccaaggccgacgggggaagaagactcatcgctgctcccacaatcagagacaaattggcccagcgagcagtattgactgtgttggagccactcggagaggctctcttccacaatgctagttttggctatcgcccccgctgcactcgagagatggccctctcttggctgagggagtgggtgagaaggggctgggcttggctcggcgacgccgacatccagaattgcttcgacgcaataccacagcagggcgtactggagttcctctggatcctctgtgaggacgctgagatactcgccctggcccgacagtggctggacagcatcccacctcgcttccgactcggagctccaggctgcggtttacctcaaggtatggtactgtctccttttctttgtaacctttacctgcacgccctggacgaaagactcgacgaagagtgcattccattcgtccgatttgccgatgattttattgtcatggggcgcaatagagatgaggcagccgacgctttggccgtggcagccgaccagctgggagccctgggcctggccttaaaccccgccaagactcaggtcatgctgtccagccctaagcaccagttcctgggctgtcggcttccagatggccggccccgatttcagcca

SEQ ID NO: 1822 - DNA, 846 bp, synthetic construct
  source 1..846: mol_type = other DNA; note = mammalian_codon_optimized_MG198-27
atgtcagacctgatccagcagattgtgtccccatccgttctcaaccatgcatggaaccatgtacgcaaggatagagctcggtggaaccaggagctgactatggctgacgtcgagcaagatctgcctcttcacattggccgcatcgccgacgaactgctgagtggcacctatagagcccagtctctgcgatgtttcgagatcgccaaagtcaatggcgaggccagaacaatatgcgcccccactgtaagagacaaattcgttcagcgcgcagtgctgactgtgctcgaacccattgccgagagctatttccacccatgcagttttggctacaggccgttgtgcactatcgatatggcactggcaaaggtgcgagaatgggttcggcaaggctacacctggcttggtgatgcggatatattccagtgttttgactctattgctcacactgctgtccttaagtgggtcgatgccctcacggaggagccaagaatcaccgccctgatagatgattggctgaatgccgtgcctgaccagtatagaccttacggtgcaggattctcactgccgcagggacaggtaattagtcccttcctgtgtaacttatatctgcatgagatggatatggatctcgaggaggcagggatccccttcgtgcgtttcgccgatgacttcatcgtgttcggctcagatcaagcaactgcagagcaagctctcgccacagcaggtgcctccctcgaacggctcggactccggtttaacgaggataagacccatgtaatacagtcttcaagaaagcaccagtttttggggaaacgtcttccaaatgccaatgtgcgctttattcca

SEQ ID NO: 1823 - DNA, 837 bp, synthetic construct
  source 1..837: mol_type = other DNA; note = mammalian_codon_optimized_MG198-28
atgggtaaactgttggagaaggctgcaagcccccctgtcatgaatcacgcttggagatggctgcggaacgatcgcgggctctgggatcgaaaacttagcatggagacagccgggtggaatattgtgagacacgtaggcgagttgtcagcagccttgttagacggaagttatcgtcccgcacccatgcactgctttacagtgaataaagctgacggcggaacaaggaccatttgcgccagccttgttcgggataagctcgcccaacgggcggcccttactgtcctggagcctcttggagaagcaatattccatcctgactcctttgggtttaggcctcagtttactcttgatatggccctcgctcgcgtgcgggagcgggtgcgtgcgggaagggtctggctcgttgacgccgacatccgacagtgcttcgattcaattccgcaggccgccgtgttgaaacaactgcagcggttgtgcggcgataaagagctggtccgcctgtggatagaatctatgcccgccgagtttttgccctttggaaaaggggtgggcttacctcaggggatggttctctctcccttcctgtgtaacctctatctccaccagatggacctctttcttgtcggaaagggagtgcctttcgtgaggttcgcagacgacttcctgctcctccttcctgaccaggccgcagcggaaagggctcgtggtcttgtcgccggatgtttgaaaagccttgggctcgagctgcatccagaaaagaccagggtggctcggagcagtccagcactgcgattcttaggaaagcgcctgcccgacggaaggccacgtttctctgtg

SEQ ID NO: 1824-1827 - skipped (4 entries)

SEQ ID NO: 1828 - DNA, 753 bp, synthetic construct
  source 1..753: mol_type = other DNA; note = mammalian_codon_optimized_MG160-488
atgactcagaagtggacccatagattcgagctcaagcctggaagatgggtgtttgtgcccacaccagaatcaagggctcggggcgaggagataaaaaaggcagtcgagaagcgatggaaaccgccttctttctattaccatctgaggaatggcggacatgtagctgcactgcggagccacgtggacaataagtattttttccgggccgatattgatgacttctttgggcgagtgaataggtctcgcgtgacaaggtgcctgaagtcctacttctcttatgccgaggcaagagaaatggccaatgaaagcgtggtgaagcaccccggtcacaacaagttcatgctcccttatgggttcgttcaatcccctatattggccagcctggccctggataaaagccgccttggcaggtaccttcgcaaactcaacaaacgcaaggggctgacggtcagtgtctacgttgatgacattatcatctcatcaaacgacgagagccttctgggagaggtggcagaggaactgaagcagttggctgagaaggcacgatttcccttgaacgccgagaaaactgaagggcccgctgaagcgatcaccgcgtttaacattgagctctcccacggctcactgaaaatcaccccagaaagaatggaagagtttcgggaagcgtaccagtccgccagttctgagcaccagaaagccggtatcctcggctacgttaatagtgtcaacccagcccaagtagcttcccttgct

SEQ ID NO: 1829 - DNA, 753 bp, synthetic construct
  source 1..753: mol_type = other DNA; note = mammalian_codon_optimized_MG160-489
atgacacagaagtggacacaccggtttgagctgaagcccggcaggtgggttttcgtgcctactcccgagtcccgcgcgcgcggagcagaaataaagaaagctgttgagaaacgctggaaaccgccttccttctactatcacctcaggaacggcgggcacgtggctgcactccggtctcatgttgacaataagtactttttcagggccgatattgatgactttttcgggcgcgtcaatcgatctagggtcacccggtgcctgaagagttatttctcatacgccgaagcaagagagatggccaacgaaagcgtggtgaaacaccccggccacaacaagtttattctgccatacggattcgtgcaatcaccaattctggcttcactggccttggacaaaagccgactcgggagatatttgaggaagctcaacaagagaaaaggacttaccgtctctgtctacgtagatgatataatcatcagtagcaacgacgaggctctgctgggtgaagtagccgaagagctgaagcagctcgcagaaaaggccctgttcccactgaatgccgagaaaactgagggccccgctgaggctatcacggcctttaatatcgaactttcccatggttctctccggattacccctgagagaatggaagaatttcgagaggcgtatcaaagtgcgtccagcgagcatcagaaagccggaatccttggctacgtgaacagcgtgaatcctgcccaggtggcatccttggct

SEQ ID NO: 1830 - DNA, 753 bp, synthetic construct
  source 1..753: mol_type = other DNA; note = mammalian_codon_optimized_MG160-490
atgactcagaaatggacccatcgctatcaactgaaacccggcaggtgggtcttcgtgcctaccgacgaggccaagaaaacgggggcccgcatcaagagagccgtggaagctcggtggaaaccgccaaacttttacttccacctgagaaagggcggccacgtggcagctgtcaggagtcatgttgaaaataagtacttttttcgggccgatttggatgatttcttcggaagggtcaaccggtctcgggtgacaagatgcctgaagagctggtttagctatgccgaggcgcgggagatggctagtgaatctgttgtgaagaggcctggtcacgagggctttattcttccctatggatttgtgcagtcacccattctggcctcactggccttggataagagtaaactggggcgatacttgcgcaaacttaatcgccgaagcgacctcaccgtgtcagtctatgtggacgacataatcatctcttccaacgacgagtcacagctgggcgaggtagctgagagattgaagcagctcgcagacaaggcactcttcccactgtccgcgagcaagacagaagggcccgccgaagaggttaccgctttcaacatcgaattgagtcatggtgcacttaggattacagatgagcgaatggcggaactcagagctgattaccagtccgccacttccgagcacagcaaagcagggatactgggatacgtagactccgtgaatcctgcccaagtcgcatctctcgct

SEQ ID NO: 1831 - DNA, 753 bp, synthetic construct
  source 1..753: mol_type = other DNA; note = mammalian_codon_optimized_MG160-491
atgactcaaaaatggacccaccgctaccagctgaagcctggtcgctgggtgttcgccccaacagatgaggccaagaagacgggagccagaattaagcgggccgtcgaggctcattggaaaccgcccaacttttactttcatctgaggaacgggggtcacgtggcagctgtccgatctcacgttgcatccaagtatttctttcgagctgatcttgacgacttctttggcagggtgaatagatctcgagtcaccagatgccttaaaagttggttcagttacgccgaagcccgcgagatggcttccgagtctgttgttaagaggcctggacatgaggggtttgtgctgccctacggattcgtccaaagtccaatcttggcatccctggctcttgacaagagtaaactcggctcttatttgcggaagctcaatgggcggtcagacctgaccgtcagcgtgtatgtagacgacataatcatctccagcgatgatgaatcacagctgggcgaggtggccgaaaggctgaaacagctggcggataaggccctttttccattgagcgcgtctaaaactgaggggcccgcggaagaagtgaccgcattcaacattgaactcagccacgctgccctgcggattacagatgagagaatggctgaactccgcgccgactatcagagcgcaacatccgagcactcaaaagcaggcatcctcggctacgtagacagcgtgaatcctgctcaggcagcctcactgaag

SEQ ID NO: 1832 - DNA, 753 bp, synthetic construct
  source 1..753: mol_type = other DNA; note = mammalian_codon_optimized_MG160-492
atgactcaaaagtggacacatcgataccagctgaaacccgggcgctgggtattcgctcctaccgatgaagctaaaaaaacaggcgccagaatcaagcgagccgtggcagcccactggaagccgccaaatttttactttcatctgcgaaacggcggccacgtggctgccgtcaggagtcacgtggccagcaagtacttcttccgggccgacctcgatgacttttttggacgggtgaatcgctcccgcgtgactcggtgcctgaagtcttggttcagctacgcagaggcccgcgaaatggcgtcagagtccgtggtgaaaaggccaggtcacaacgggttcgtcctgccttatgggtttgttcagtcacctattttggcctcattggccctggacaaaagtaaactgggctcctaccttagaaagctgaacggcagatccgacctcaccgtttccgtttatgtcgatgatataattatctcctctgacgatgagagccagctgggagaggtagccgctagattgaaacagctcgcagataaggcactcttccccctttcagctagtaagacagaggggcccgcttctggtgtgacggcctttaacattgagctttctcacgctgcacttaggatcaccgacgaacggctcgcggaactcagggcggactatcaagccgctgctagtgaacatagcaaggcaggaatcctgagctatgtccattctgtcaatcccgcacaggcggccagcctgaag

SEQ ID NO: 1833 - DNA, 753 bp, synthetic construct
  source 1..753: mol_type = other DNA; note = mammalian_codon_optimized_MG160-493
atgtcccagaaatggactcatcggtttgaaatcaagcccggaaagtgggtgtttgtgccttctgacgagtctaggcagcatggaaaaaagattaaaaaacagatcgagaagcgctggaagccgcctgactactactaccacctgaggaatggcggccacgtcgctgcacttaagagtcatcttaataataagtatttcctgcgcctcgatataaagaacttcttcggtagcattaatagatcaagggtgactagagcacttaagaagtttttcagctatgaagaggccagagagattgccaatgaatctaccgtacggcaccccaacaataagaagtacatactgccatttgggttcgtccagagcccaatcttggcctcactttgcctcgataagagtgctctgggccgatacctgcacaaactcaacaaaaacaacggcatcaccgtcagcgtttatatggacgacattattatctcttcaaacgatcaagaacagttgcaagaggtgttggaagagatcaaaacggccgccgaaaaaagcgggtttcctctgaatgaggagaaaacacagggaccatccgataagatcaccgccttcaatatcgagctgtcccacgggaatctcaaaattacagacgagcgcatgaacgagtttatggaagcgtacaaaaactccaactccgagcatcagcgagaaggcatacttaactatgttcggagtgtgaaccccgctcaagctgaacagctggca

SEQ ID NO: 1834 - DNA, 753 bp, synthetic construct
  source 1..753: mol_type = other DNA; note = mammalian_codon_optimized_MG160-494
atgatggagaagtggaagcataagtttgagatcaagaaggatcgctgggtgtacgtcccctcaaaggaaatgctccagttcggcaagaagatccacaagtacattaggaaaaaatggaagccgccactctatttctaccacctgagagacggcggccatgtggccgcagctaaactgcacctgaataacaagtacttcgctctgatcgatattagcaactttttcgagtccacttcacagtctagggtgactcgggaactgaaaaaattcattccctacgagaaagcacgcgagatagctaaactttccacggtaagaaatcctaactcaacaaagtatgtgattccctatgggtatcctcagagccccattttggccacattgtgtctccacaatagttactgcggaaacgtgataaactctattaacaagagcgggaacgttaccgtcagcgtgtacatggacgatataatcatttcttccaacgacctgaatctcctgaacgaagcgtttgaccttatcctggaagccctcgagaagagcggctatcagatcaatgaaaataaaacccagagtccttccaagaaaatcaaggtcttcaaccttgagctgtcccacaatagtttgcgggttaccccaaaacgaatggtagaatttctgcaggcttacgcaaaaagtaagaatgagcatgagagagaaggtatcgcctcttatgtggggtcagttaatcctcaacaagccaaactctttcca

SEQ ID NO: 1835 - DNA, 753 bp, synthetic construct
  source 1..753: mol_type = other DNA; note = mammalian_codon_optimized_MG160-495
atgatggaaatgtggaagcacaagttcgaaatcaaaaaggatagatgggtctacgtgccttctaaagagatgcttcagtttggaaagaagatacacaagtacatccgaaaaaaatggaagccgccactctatttttaccatctgaggaatgggggacatgttgccgctgccaaacttcacctgaacaacaagtatttcgcccttattgacatttcaaattttttcgagagcaccagccagagccgggtgacacgcgagctcaaaaagttcataccctacgaaaaagctcgggagattgctaaactgtccacagtgcgcgtccccaattccaagaagtatgcgattccatatgggtatccacagtcacccatcctggccaccctgtgtctccataattcttacgccggcaatgttatagactccattaataaaagtggcaacgtaacggtctcagtgtacatggacgatattattatcagcagtaacgacttgaatgttttgaacgaggcatttgatctgatctgcactgctctcgagaaaagcaagtaccagatcaacgaagataagacccaatccccctctaaaaagatcaaggtgttcaacctggagttgtcacacaactctctgagggtgactcctaagagaatggtcgagtttatccaagcgtatgcaaagagtgagaatgaacacgaacgggaaggtatcgcatcctacgtgagaagtgtaaaccctcagcaggccaaaaggttccct

SEQ ID NO: 1836 - DNA, 753 bp, synthetic construct
  source 1..753: mol_type = other DNA; note = mammalian_codon_optimized_MG160-496
atgatggagatgtggaagcacaagttcgaaataaaaaaggaccggtgggtgcatgtcccttcaaaggaaatggttctgttcggcaagaagatccacaagtttataagaaggaaatggaagccgcccttgtactattatcatctgcgaaatggtgggcacgtagcagccgcgaaactccatctgaacaacgattacttcgcccttattgacatctctaacttttttgagagtacctctcagtctagggtgactagggagttgaaaaagataatcccctacaataaggcccgggaaatcgctaaactttccacggtaagagtgccaaatagcaagaaattttctatcccttacggatacccacagtcacccattctcgccaccttgtgtctccacaatagctacgctggaaatgtcattgactccatcaacaaaagtgggaatgtcaccgtgtccgtctacatggatgacattatcatctccagcaacgacctgaatgtgctgaatgaggcgtttgatcttatctgcactgccctgaagaagagccggtatcaaattaacgttgataaaacacagagcccatcaaaaaagattaaagtgttcaacctcgagctgtcccataaccacctgaaggttacatcaaaaagaatggtgcagttcatacaggcctatgcaaaaagtgaaaacgaatatgagcgcgagggcattgcagcttatgtgcgaagtgtcaatcctcaacaggctaaccgcttcccc

SEQ ID NO: 1837 - DNA, 753 bp, synthetic construct
  source 1..753: mol_type = other DNA; note = mammalian_codon_optimized_MG160-497
atgatggaaatgtggaagcacaagtttgagatcaagaaggatcggtgggtgcacgttccaagcaaagaaatggttctgttcggtaaaaaacttcataagtttatccgaagaaagtggaaaccgcctctgtattactatcatctgcgaaacgggggacatgtcgccgctgcaaagctccacaagaataatgactacttttccctgattgacatttcaaattttttcgagagtaccagccagagcagggtcacaagagagctgaaaaaaatcataccctacgagaaagcacgcgagattgctaaactgagtacagtaagggtaccaaactctaaaaagttctctatcccttatgggtatccccagagccccatccttgctaccttgtgtctccacaactcctacgccggcaatgtcatcgactccatcaacaagagtggcaatgtgactgtctctgtgtatatggacgatattattttgtctagcaaggacttgaacgtgctcaacgaagccttcgatctcatttgcactgccctgaaaaaatcacggtaccaaataaacgtggataagacgcaaagcccttccaagaagatcaaagtgtttaaccttgagctttcacataaccacctgaaggttacctcagagagaatggtgcagttcattcaggcgtacgcaaagagtcagaatgagtacgaacgggaaggaatagccgcttatgtgaggtccgtcaatccccagcaggccaatcgcttccca

SEQ ID NO: 1838 - DNA, 753 bp, synthetic construct
  source 1..753: mol_type = other DNA; note = mammalian_codon_optimized_MG160-498
atgatggaaatgtggaagcataagtttgaaattaagaaagatcgatgggttcatgtgccaagcaaagagatggtgctcttcggaaaaaaactgcataagtttatcaggagaaagtggaagccgcccctttactattatcatttgagaaacgggggtcacgttgccgccgccaagatgcacaagaataacgactacttttccctgatcgatataagcaacttcttcgagagtacctcacagtcccgcgtaaccagagagctgaagaaaataatcccttatgagaaggcccgggagatagccaaactcagcactgtgcgggttcctaattcaaagaaattttccatcccatacggctatcctcaatctcccatcctggcttctctgtgcttgcacaattcatatgcaggaaatgtgctggattctatcaataaaagtggcaacgtgctcgtgagtgtctacatggatgacatcattctcagctctaaagatctgaatgtgctgaatgaagcatttgacctcatttgtacggccctgaagaaatcacgctatcaaattaacattgacaagacacagagcccatccaagaagatcaaggtcttcaatcttgagctttcccacgaccacttgaaagtgtcttccgagaggatggtccagttcattcaggcgtacgcaaaaagtcagaacgagtacgaacgggaagggattgctgcttacgtcaggagcgtaaacccccagcaggctaaccttttcccc

SEQ ID NO: 1839 - DNA, 753 bp, synthetic construct
  source 1..753: mol_type = other DNA; note = mammalian_codon_optimized_MG160-499
atgagccagccttggacacaccggttcgaaattaagcccgggagatgggtgtacgtgccaagcgacgagtcccgccagcatggtaagaagatcaaaaagcagatcaagaagaggtggaaaccgcccgattattattaccacttgagaaacggtggacatgtagctgccctcaagtctcacctgaacaataagtacttcgcgagtttggatattaaaaacttcttcgggtcaatcagcaggagccgggttactcgagctctgaaaaaattttttagctatgaagaagcacgcgagattgctaaacaatcaactgtgaggcatccaaacaatcacaagtattcactgccttttgggtttgttcagtctcccattcttgcctctctttgccttgacaagagtgccctgggaagatacttgcacaaactcaataaaaacaagggcatcacagtgagtgtctacatggacgacataataatttcttccaatgatcaggaagagctgcaagaggcctttgaggagctgaaagaagccgcagaaaaatccaatttccctctcaatgaggagaagacccagggccccagcgataagatcaccgcgttcaatatagagctctcacatggaaacttgaagatcacggacgagcgcatgtccgagtttatggaagcatatcaaaattccaactccgagcaccagcgggaaggcatcctgagttacgtccgatctgtgaacccagcccaggcaaaacagctggct

SEQ ID NO: 1840 - DNA, 753 bp, synthetic construct
  source 1..753: mol_type = other DNA; note = mammalian_codon_optimized_MG160-500
atgagccagccctggactcaccgctttgagattaaacctggcagatgggtgtatgtgccatcagacgagagtagggagcacggaaagaaaattaagaagcaaatcaagaagagatggaaagccccggactattactatcacttgcggaatgggggccatgtcaaagcactcaagtcccacaccaacaataagtactttgcatcactggacatcaagaacttttttggctcaatcagcaggtcccgagtgacccgcgccttgaaaaagaggttcagctacgaggaagctcgggagatcgccgttcaatccacagtgagacatccaaataatcataagtactctttgcccttcggtttcgtgcagagtcctatactggccagcatatgccttgataagagtgctctggggcgctatcttcataaactgtccaaaaacaagggactgacagtatctgtctacatggatgacattatcatttcttctaatgaccaggaagagctccaggaagcgtttgatgagctgaaggaagcagctgaaaaaagtaacttccctctcaatgaggagaaaactcaacagccctcagataagatcaccgctttcaacattgaactcagccacaacaacctgaaaataacggatgagcggtacagccagttcatggaagcgtaccagtcttccaactccgaatatcagcgagagggtatcctttcttatgttaggagcgtcaatccagcccaggccaaacaactgaag

SEQ ID NO: 1841 - DNA, 753 bp, synthetic construct
  source 1..753: mol_type = other DNA; note = mammalian_codon_optimized_MG160-501
atgaaccagccttggaaacacaggtttgagataaagcccggccgctgggtgtacgttccctcagatgagtccctggagcatgggaagaaaatcaaaaagcagattaaaaagcgctggaaagcgcctgactattactatcacctgagaaatggcggacatgtgaaagccctcaagagccacaccgacaacaagtacttcgcttcacttgacattgagaacttctttggctccatctctaggagccgagtgaccagagcactgaaaaagagattctcttacgaacaggccagggagatcgccgttcagtctacagtccggcatccgaacaatcacaagtactcactcccattcggatttgttcaatctactatcctggcttctatctgccttgacaaaagtgccttgggtcggtacttgcataagctctcaaagaataaaggtctgacggtcagcgtgtatgtagatgatattattataagttccaacgaccaggaagagctgcaaaaggcgtttgacgagcttaaggaagcagctaccaaaagtaatttccccctcaatgaagagaaggtccaacaggtgagtgataagatcacagcctttaacattgaactctcccacaacaatctgaagatcactgatgagcggtattcccagttcttggaagcatatcagagcagcaatagcgagtatcaacgagaagggatactgtcctacgtacgcagcgtgaatccagcccaggctaaccagctcaaa

SEQ ID NO: 1842 - DNA, 753 bp, synthetic construct
  source 1..753: mol_type = other DNA; note = mammalian_codon_optimized_MG160-502
atgaatcagccctggaagcacagattcgagataaagcctggcaggtgggtgtacgtgcctaccgatgagagccttgagcacggcaaaaaaatcaaaaagcagataaagaaacgctggaaggccccctcatactactaccatctgcacgaaggtgggcacgtgaaagcaattcagagtcacacagataataagtatttcgcctctttggacattgagaacttcttcggcagcatctccaggtcccgagtcacaaggagtttgaagaagcgctttagctacgagcaggctagagaaatcgctgttcagagcaccgttcggcatcccaacgagcataagtattccctgccatacggatttcctcaatctactatcctggcctctatctgcctggaccaaagcgccctcggtcgatatttgcactctctgtccaaaaacagaggactgacggtatccgtgtatgttgatgatattattataagctctaatgaccaggaagaacttcaaaaggcctcagacgagcttaaagaagcagccgtcaaaagcaatctcccgtttaacaaagagaaggtacagcaggtctctgacaagatcacagctttcaacattgagctctcacataacaatctgaagatcactgatgagaggtattcacagtttctggaagcgtatcaggcgagtaataatgaatacacccgcgaagggattttgtcctacgtgcggagtgtgaacccagcacaagctaaccagctccgg

SEQ ID NO: 1843 - DNA, 753 bp, synthetic construct
  source 1..753: mol_type = other DNA; note = mammalian_codon_optimized_MG160-503
atgacactgccttggaaggatcgattccaggtgaagcccggccggtgggtgtacattccaactcaagagaccctcgagcagggtcggcagattaaggccctcgtcgctgagaagtttcaggcgccgtcattctattaccacctgcatgagggcggccacgtggcagcgatccagtcacacaccgacgatcgatattttctgaacgtggatatagagaacttcttcggggctattaaccgcagtagggtcaccagaagtctcaagaagaggttcccctatgcacaggctagagaaattacggtacagtctaccgttagggtcaccaatgaatacgagtaccaccttccttacggttacccccagagcacgatccttgcctctatctgcctgtttgacagcgccctggggagatatttgcattctcttagtgctcaacacaatctcaccgtgtctgtttatgtagatgacataatcatcagcgggaatgaccacgcagaactccagcaaattagcgatactctggtggagaaatccgttgccagccgcctgccttttggaaggaaaaaagtcacacaggtgtccgatcggatcacagcctttaatatagagctttcccatcatacaatgaaaatcactgaccaacgctacaaccaactgcttcagcaggccctgttgactgacaacgaaaatgtgatcgaaggaattttgtcctatgtgagatcagtcaacccacggcagcataacaatatgcgc

SEQ ID NO: 1844 - DNA, 5178 bp, synthetic construct
  source 1..5178: mol_type = other DNA; note mammalian_codon_optimized_tethered_system_MG160-491-MG71-2n
atgaagaggaccgctgatggttccgaatttgaatctcctaagaagaaacgaaaggttatgactcaaaaatggacccaccgctaccagctgaagcctggtcgctgggtgttcgccccaacagatgaggccaagaagacgggagccagaattaagcgggccgtcgaggctcattggaaaccgcccaacttttactttcatctgaggaacgggggtcacgtggcagctgtccgatctcacgttgcatccaagtatttctttcgagctgatcttgacgacttctttggcagggtgaatagatctcgagtcaccagatgccttaaaagttggttcagttacgccgaagcccgcgagatggcttccgagtctgttgttaagaggcctggacatgaggggtttgtgctgccctacggattcgtccaaagtccaatcttggcatccctggctcttgacaagagtaaactcggctcttatttgcggaagctcaatgggcggtcagacctgaccgtcagcgtgtatgtagacgacataatcatctccagcgatgatgaatcacagctgggcgaggtggccgaaaggctgaaacagctggcggataaggccctttttccattgagcgcgtctaaaactgaggggcccgcggaagaagtgaccgcattcaacattgaactcagccacgctgccctgcggattacagatgagagaatggctgaactccgcgccgactatcagagcgcaacatccgagcactcaaaagcaggcatcctcggctacgtagacagcgtgaatcctgctcaggcagcctcactgaagtctggcggcagcagcggcggctcaagcggaagtgaaacacctggaacttccgaaagcgctacgcctgaatcttctggtggatcttctggcggatcttccgcatgccagaacaagaagaacgtcgactactacgtcggcctggacatgggagatgcctctgttggatgggccgtgaccgacctgaactacaacatcctgaagttcaacggcaaggccctgtggggcatcagactgttcgattctgccgaaaccgccgctgccagaagaggctttagatctgccaggcggcggatcgacagagtgtcttggagaatctccatgctgcaagagctgttcgccgacgagatcgccaaagtggatgccggcttcttccagcggctgaaggatagcagactgcaggtcgaggacaagcaagagaaaaccgcctacaacctgttcgtgggccagaactacaccgacaaggacttctaccagcagtaccccaccatgtaccacctgagatacgccctggctacacaggccggaccttttgatgtgcggctgctgtatctggccgtgcagcacatcgtgaagcaccggggccactttctgttcgagaacctggacgccagcaaagtgggcgatttcgtggccgtgtttggcgaggtggaaagctacgtgcacgacgagatggaactggacgagtggtactgccacgacatcgatgccctggccaaggtgctgtgcaatgccaatctgggcatcaccgccaagcagaaggccatccagaatctgctgcccgccaagaccaagcaagaaaaggccatcgtgcagctgctgagcggcggaaaggccaagctgtgcgacctgttctgtgacgaggaactggccgaatgcgagaaaaagagcatcagcttccaagaggacaacctcgatgagctggaacccatcctggaagctatcctgcaagagagatacgaggccctgctgcggttcaaggccgtgtatgattggagcctgctggccaagatcctgagactggacgccgacaagaaaagcgagaacgagatgcacctcctgagcgagtgcaaagtgaaggtgtacgaggaacacaagaaagacctggctgtgctgaagtccatgctgaagggcaagcccctgtacaacaagctgttcagacaggacggcgaggacacctacgccaattacgcccagggaatcaaagggatcaaccaggtggacttctgcaagtccctgaagaagcagctggaatctatcggcgagtacaagaaacagatgcagcagctgaccagcttcgaggacgcccagaccgatgtggaaagactgctgtttagagtggccaacggcctggctttccccaagcagaccaccaaggacaacggcatcatcccaatccaggttcacctggccgagctgcagtgtatcctggctcacgccgagaagtacctgcctttcctgaagaacgccgacgccaatggcctgagcgtgcgggaaaagatcacccagatcgtgaagttcagaatcccctactacgtgggacccctggccggcacaagactgtctagagaacagggcagatgctgggtcgagcggagagccgagctgaagaatgagaagatctacccctggaacttcgacaaggtggtggacctggaagcctccgccgagaacttcatcaccaacatgaccgccaagtgcacctacctcgtgggcgaagatgtgctccccaaagagtccctgctgtactccgagttcatggtccgaaacgccctgaacaacctgaccatcgacggcgagagactgcccgtttctctgctgcagaaaatctacaagcagctgttcctggaaaagaccttcaaagtgaccaagaaggccctggaacggttcttcaaacaagagaatgtgtcctaccacgatatcggcggcatcgacgacaagatcaacgcctccatgaaggcctacaacgacttcaagcggatcttcggcgaggcctacatcgaaatgcaccgggatgagatcgagaacatcatccggtggatcaccctgttttgcgacgagaagaagatgctcgagacaaagatccgcaagacgtaccctcagatccccgatgataagatcaaggccattaagaagctgaagtacaaggactggggcagactgagcgccacactgctggattctggcaagatcgcctacgaggatgccagcgtgggcgagagaatcaccatcatctctgccctgcggcacaccaacaagaatttcatggaactgctgagcagcaactgccagtacgacttcatcggcaagattaaggacttcaacggctccaagcagagcgacaatggcaagctgacctacaaggatgtggaagaactgtacgtgtcccctagcgtgaagcggagcatctggcagaccctgaccattctggaagagatcaagaaaatcatgggctgcgagcccaagcgcatcttcatcgagatggccagaagcaaagaggaaagcctgcggaccaacagcaggctgcagagactccaggacctgtacaagaagtgcaaagaagagaacatcgacttcatgcccaaggccgacgagctgaccgacatcagatctcagctccagtgcaagaacgaagaggacctgcggagcgacaagctgtacctgtactacacccagatggggagatgcatgtacaccggcgagaggatcgaactggccagcctgtacgaccagaacaaatacgacgtggacgccatctaccccaggtctaagaccaaggacgacagcctgaacaatcgggtgctcgtgaagaaagagattaacagcgccaagacagacaactaccccatcgacgctgacatccggaagaaaatgcacgccttttggaagatgctgtacgacaagggcttcatcgaccaaaagaagtacgagcggctgaccagaagcacccagctgacagatgaagaactggctggcttcatcaaccggcagctggtggaaaccagacagagcacaaaggccaccgccgacattctgaagtctgcctacgagcacagcgaggtggtgtatgtgaaggccggcaacgtgtccgatttccggcagcagttcgacttcgtgaagtgccgggaagtgaacgacctgcaccacgccaaggacgcctacctgaatatcgtcgtgggcaactgctaccacgtcaagttcaccatcaatccgctgatgttcatccggggcaaccaggacaaccggcggtactctctgaagcccgaggtgttctacgcccacgacattaagcggaacggggagattgcttggctggccggcgataatggcaccatggccacagtgaagagagtgatgcagaaaaacaacgtgctgttcacccggctggccgtggaaggcaaaggcgagctgttcaagcagaaccctctgaaggccaagagcggccagctgcctcttaaagccggcctgagcatcgataagtatggcggctacgactccctgagcaccgcctattttgccctggtggaatccgagggcaagaaaggcgccgtgcagtttacaatcgaggccattcctctggtgtacgccaaacagggcgaagccaccatcaagaaatacctgacagaggtggtgcagctgtgcaagcccgagatcaaagtgatgcggatcaagaagtactccctgctgaagatcaatggcttccccatgcacatctccggcagaaccggaaagcagctgatcttctacgtggccagccagctgtgtatcgacgagaacagcgtggcctatctgaagaaagccctgaagtatgagagcaacctcgaggaaaacgaggccatcctggccgataagaatgccgacgagtccatgaagcagaaagccttcaaccggctcatgttctacaaggacacctggggaatcagcgccgaggctaacctgcagctgtacgatatgctgctggctaagagcgccaacaacctctacaagaacagacccgccagccagaccgccactctgaaagagaagagagagcagttcgccaagctgagcctgagcaagcagatccacgtgatcaaagagatcctgaacctgttcaagtgcgcctccgccagcgccgatttcaagctgcttgataagggcgctgcctgcggcatcctgaaagtgtccaacaacatcaccaagctgaagcagtgcgtgctgatcaatcagagccccaccggcgtgttcgagcaagaggttgacctgatgagactgcctaggggcggcggaggcagctacccctatgatgtacctgattatgcttctggcggacccaagaagaagaggaaagtcggtggttctcctaagaaaaagagaaaggtcggatccggc

SEQ ID NO: 1845 - DNA, 5178 bp, synthetic construct
  source 1..5178: mol_type = other DNA; note mammalian_codon_optimized_tethered_system_MG160-492-MG71-2n
atgaagaggaccgctgatggttccgaatttgaatctcctaagaagaaacgaaaggttatgactcaaaagtggacacatcgataccagctgaaacccgggcgctgggtattcgctcctaccgatgaagctaaaaaaacaggcgccagaatcaagcgagccgtggcagcccactggaagccgccaaatttttactttcatctgcgaaacggcggccacgtggctgccgtcaggagtcacgtggccagcaagtacttcttccgggccgacctcgatgacttttttggacgggtgaatcgctcccgcgtgactcggtgcctgaagtcttggttcagctacgcagaggcccgcgaaatggcgtcagagtccgtggtgaaaaggccaggtcacaacgggttcgtcctgccttatgggtttgttcagtcacctattttggcctcattggccctggacaaaagtaaactgggctcctaccttagaaagctgaacggcagatccgacctcaccgtttccgtttatgtcgatgatataattatctcctctgacgatgagagccagctgggagaggtagccgctagattgaaacagctcgcagataaggcactcttccccctttcagctagtaagacagaggggcccgcttctggtgtgacggcctttaacattgagctttctcacgctgcacttaggatcaccgacgaacggctcgcggaactcagggcggactatcaagccgctgctagtgaacatagcaaggcaggaatcctgagctatgtccattctgtcaatcccgcacaggcggccagcctgaagtctggcggcagcagcggcggctcaagcggaagtgaaacacctggaacttccgaaagcgctacgcctgaatcttctggtggatcttctggcggatcttccgcatgccagaacaagaagaacgtcgactactacgtcggcctggacatgggagatgcctctgttggatgggccgtgaccgacctgaactacaacatcctgaagttcaacggcaaggccctgtggggcatcagactgttcgattctgccgaaaccgccgctgccagaagaggctttagatctgccaggcggcggatcgacagagtgtcttggagaatctccatgctgcaagagctgttcgccgacgagatcgccaaagtggatgccggcttcttccagcggctgaaggatagcagactgcaggtcgaggacaagcaagagaaaaccgcctacaacctgttcgtgggccagaactacaccgacaaggacttctaccagcagtaccccaccatgtaccacctgagatacgccctggctacacaggccggaccttttgatgtgcggctgctgtatctggccgtgcagcacatcgtgaagcaccggggccactttctgttcgagaacctggacgccagcaaagtgggcgatttcgtggccgtgtttggcgaggtggaaagctacgtgcacgacgagatggaactggacgagtggtactgccacgacatcgatgccctggccaaggtgctgtgcaatgccaatctgggcatcaccgccaagcagaaggccatccagaatctgctgcccgccaagaccaagcaagaaaaggccatcgtgcagctgctgagcggcggaaaggccaagctgtgcgacctgttctgtgacgaggaactggccgaatgcgagaaaaagagcatcagcttccaagaggacaacctcgatgagctggaacccatcctggaagctatcctgcaagagagatacgaggccctgctgcggttcaaggccgtgtatgattggagcctgctggccaagatcctgagactggacgccgacaagaaaagcgagaacgagatgcacctcctgagcgagtgcaaagtgaaggtgtacgaggaacacaagaaagacctggctgtgctgaagtccatgctgaagggcaagcccctgtacaacaagctgttcagacaggacggcgaggacacctacgccaattacgcccagggaatcaaagggatcaaccaggtggacttctgcaagtccctgaagaagcagctggaatctatcggcgagtacaagaaacagatgcagcagctgaccagcttcgaggacgcccagaccgatgtggaaagactgctgtttagagtggccaacggcctggctttccccaagcagaccaccaaggacaacggcatcatcccaatccaggttcacctggccgagctgcagtgtatcctggctcacgccgagaagtacctgcctttcctgaagaacgccgacgccaatggcctgagcgtgcgggaaaagatcacccagatcgtgaagttcagaatcccctactacgtgggacccctggccggcacaagactgtctagagaacagggcagatgctgggtcgagcggagagccgagctgaagaatgagaagatctacccctggaacttcgacaaggtggtggacctggaagcctccgccgagaacttcatcaccaacatgaccgccaagtgcacctacctcgtgggcgaagatgtgctccccaaagagtccctgctgtactccgagttcatggtccgaaacgccctgaacaacctgaccatcgacggcgagagactgcccgtttctctgctgcagaaaatctacaagcagctgttcctggaaaagaccttcaaagtgaccaagaaggccctggaacggttcttcaaacaagagaatgtgtcctaccacgatatcggcggcatcgacgacaagatcaacgcctccatgaaggcctacaacgacttcaagcggatcttcggcgaggcctacatcgaaatgcaccgggatgagatcgagaacatcatccggtggatcaccctgttttgcgacgagaagaagatgctcgagacaaagatccgcaagacgtaccctcagatccccgatgataagatcaaggccattaagaagctgaagtacaaggactggggcagactgagcgccacactgctggattctggcaagatcgcctacgaggatgccagcgtgggcgagagaatcaccatcatctctgccctgcggcacaccaacaagaatttcatggaactgctgagcagcaactgccagtacgacttcatcggcaagattaaggacttcaacggctccaagcagagcgacaatggcaagctgacctacaaggatgtggaagaactgtacgtgtcccctagcgtgaagcggagcatctggcagaccctgaccattctggaagagatcaagaaaatcatgggctgcgagcccaagcgcatcttcatcgagatggccagaagcaaagaggaaagcctgcggaccaacagcaggctgcagagactccaggacctgtacaagaagtgcaaagaagagaacatcgacttcatgcccaaggccgacgagctgaccgacatcagatctcagctccagtgcaagaacgaagaggacctgcggagcgacaagctgtacctgtactacacccagatggggagatgcatgtacaccggcgagaggatcgaactggccagcctgtacgaccagaacaaatacgacgtggacgccatctaccccaggtctaagaccaaggacgacagcctgaacaatcgggtgctcgtgaagaaagagattaacagcgccaagacagacaactaccccatcgacgctgacatccggaagaaaatgcacgccttttggaagatgctgtacgacaagggcttcatcgaccaaaagaagtacgagcggctgaccagaagcacccagctgacagatgaagaactggctggcttcatcaaccggcagctggtggaaaccagacagagcacaaaggccaccgccgacattctgaagtctgcctacgagcacagcgaggtggtgtatgtgaaggccggcaacgtgtccgatttccggcagcagttcgacttcgtgaagtgccgggaagtgaacgacctgcaccacgccaaggacgcctacctgaatatcgtcgtgggcaactgctaccacgtcaagttcaccatcaatccgctgatgttcatccggggcaaccaggacaaccggcggtactctctgaagcccgaggtgttctacgcccacgacattaagcggaacggggagattgcttggctggccggcgataatggcaccatggccacagtgaagagagtgatgcagaaaaacaacgtgctgttcacccggctggccgtggaaggcaaaggcgagctgttcaagcagaaccctctgaaggccaagagcggccagctgcctcttaaagccggcctgagcatcgataagtatggcggctacgactccctgagcaccgcctattttgccctggtggaatccgagggcaagaaaggcgccgtgcagtttacaatcgaggccattcctctggtgtacgccaaacagggcgaagccaccatcaagaaatacctgacagaggtggtgcagctgtgcaagcccgagatcaaagtgatgcggatcaagaagtactccctgctgaagatcaatggcttccccatgcacatctccggcagaaccggaaagcagctgatcttctacgtggccagccagctgtgtatcgacgagaacagcgtggcctatctgaagaaagccctgaagtatgagagcaacctcgaggaaaacgaggccatcctggccgataagaatgccgacgagtccatgaagcagaaagccttcaaccggctcatgttctacaaggacacctggggaatcagcgccgaggctaacctgcagctgtacgatatgctgctggctaagagcgccaacaacctctacaagaacagacccgccagccagaccgccactctgaaagagaagagagagcagttcgccaagctgagcctgagcaagcagatccacgtgatcaaagagatcctgaacctgttcaagtgcgcctccgccagcgccgatttcaagctgcttgataagggcgctgcctgcggcatcctgaaagtgtccaacaacatcaccaagctgaagcagtgcgtgctgatcaatcagagccccaccggcgtgttcgagcaagaggttgacctgatgagactgcctaggggcggcggaggcagctacccctatgatgtacctgattatgcttctggcggacccaagaagaagaggaaagtcggtggttctcctaagaaaaagagaaaggtcggatccggc

SEQ ID NO: 1846 - DNA, 5178 bp, synthetic construct
  source 1..5178: mol_type = other DNA; note mammalian_codon_optimized_tethered_system_MG160-493-MG71-2n
atgaagaggaccgctgatggttccgaatttgaatctcctaagaagaaacgaaaggttatgtcccagaaatggactcatcggtttgaaatcaagcccggaaagtgggtgtttgtgccttctgacgagtctaggcagcatggaaaaaagattaaaaaacagatcgagaagcgctggaagccgcctgactactactaccacctgaggaatggcggccacgtcgctgcacttaagagtcatcttaataataagtatttcctgcgcctcgatataaagaacttcttcggtagcattaatagatcaagggtgactagagcacttaagaagtttttcagctatgaagaggccagagagattgccaatgaatctaccgtacggcaccccaacaataagaagtacatactgccatttgggttcgtccagagcccaatcttggcctcactttgcctcgataagagtgctctgggccgatacctgcacaaactcaacaaaaacaacggcatcaccgtcagcgtttatatggacgacattattatctcttcaaacgatcaagaacagttgcaagaggtgttggaagagatcaaaacggccgccgaaaaaagcgggtttcctctgaatgaggagaaaacacagggaccatccgataagatcaccgccttcaatatcgagctgtcccacgggaatctcaaaattacagacgagcgcatgaacgagtttatggaagcgtacaaaaactccaactccgagcatcagcgagaaggcatacttaactatgttcggagtgtgaaccccgctcaagctgaacagctggcatctggcggcagcagcggcggctcaagcggaagtgaaacacctggaacttccgaaagcgctacgcctgaatcttctggtggatcttctggcggatcttccgcatgccagaacaagaagaacgtcgactactacgtcggcctggacatgggagatgcctctgttggatgggccgtgaccgacctgaactacaacatcctgaagttcaacggcaaggccctgtggggcatcagactgttcgattctgccgaaaccgccgctgccagaagaggctttagatctgccaggcggcggatcgacagagtgtcttggagaatctccatgctgcaagagctgttcgccgacgagatcgccaaagtggatgccggcttcttccagcggctgaaggatagcagactgcaggtcgaggacaagcaagagaaaaccgcctacaacctgttcgtgggccagaactacaccgacaaggacttctaccagcagtaccccaccatgtaccacctgagatacgccctggctacacaggccggaccttttgatgtgcggctgctgtatctggccgtgcagcacatcgtgaagcaccggggccactttctgttcgagaacctggacgccagcaaagtgggcgatttcgtggccgtgtttggcgaggtggaaagctacgtgcacgacgagatggaactggacgagtggtactgccacgacatcgatgccctggccaaggtgctgtgcaatgccaatctgggcatcaccgccaagcagaaggccatccagaatctgctgcccgccaagaccaagcaagaaaaggccatcgtgcagctgctgagcggcggaaaggccaagctgtgcgacctgttctgtgacgaggaactggccgaatgcgagaaaaagagcatcagcttccaagaggacaacctcgatgagctggaacccatcctggaagctatcctgcaagagagatacgaggccctgctgcggttcaaggccgtgtatgattggagcctgctggccaagatcctgagactggacgccgacaagaaaagcgagaacgagatgcacctcctgagcgagtgcaaagtgaaggtgtacgaggaacacaagaaagacctggctgtgctgaagtccatgctgaagggcaagcccctgtacaacaagctgttcagacaggacggcgaggacacctacgccaattacgcccagggaatcaaagggatcaaccaggtggacttctgcaagtccctgaagaagcagctggaatctatcggcgagtacaagaaacagatgcagcagctgaccagcttcgaggacgcccagaccgatgtggaaagactgctgtttagagtggccaacggcctggctttccccaagcagaccaccaaggacaacggcatcatcccaatccaggttcacctggccgagctgcagtgtatcctggctcacgccgagaagtacctgcctttcctgaagaacgccgacgccaatggcctgagcgtgcgggaaaagatcacccagatcgtgaagttcagaatcccctactacgtgggacccctggccggcacaagactgtctagagaacagggcagatgctgggtcgagcggagagccgagctgaagaatgagaagatctacccctggaacttcgacaaggtggtggacctggaagcctccgccgagaacttcatcaccaacatgaccgccaagtgcacctacctcgtgggcgaagatgtgctccccaaagagtccctgctgtactccgagttcatggtccgaaacgccctgaacaacctgaccatcgacggcgagagactgcccgtttctctgctgcagaaaatctacaagcagctgttcctggaaaagaccttcaaagtgaccaagaaggccctggaacggttcttcaaacaagagaatgtgtcctaccacgatatcggcggcatcgacgacaagatcaacgcctccatgaaggcctacaacgacttcaagcggatcttcggcgaggcctacatcgaaatgcaccgggatgagatcgagaacatcatccggtggatcaccctgttttgcgacgagaagaagatgctcgagacaaagatccgcaagacgtaccctcagatccccgatgataagatcaaggccattaagaagctgaagtacaaggactggggcagactgagcgccacactgctggattctggcaagatcgcctacgaggatgccagcgtgggcgagagaatcaccatcatctctgccctgcggcacaccaacaagaatttcatggaactgctgagcagcaactgccagtacgacttcatcggcaagattaaggacttcaacggctccaagcagagcgacaatggcaagctgacctacaaggatgtggaagaactgtacgtgtcccctagcgtgaagcggagcatctggcagaccctgaccattctggaagagatcaagaaaatcatgggctgcgagcccaagcgcatcttcatcgagatggccagaagcaaagaggaaagcctgcggaccaacagcaggctgcagagactccaggacctgtacaagaagtgcaaagaagagaacatcgacttcatgcccaaggccgacgagctgaccgacatcagatctcagctccagtgcaagaacgaagaggacctgcggagcgacaagctgtacctgtactacacccagatggggagatgcatgtacaccggcgagaggatcgaactggccagcctgtacgaccagaacaaatacgacgtggacgccatctaccccaggtctaagaccaaggacgacagcctgaacaatcgggtgctcgtgaagaaagagattaacagcgccaagacagacaactaccccatcgacgctgacatccggaagaaaatgcacgccttttggaagatgctgtacgacaagggcttcatcgaccaaaagaagtacgagcggctgaccagaagcacccagctgacagatgaagaactggctggcttcatcaaccggcagctggtggaaaccagacagagcacaaaggccaccgccgacattctgaagtctgcctacgagcacagcgaggtggtgtatgtgaaggccggcaacgtgtccgatttccggcagcagttcgacttcgtgaagtgccgggaagtgaacgacctgcaccacgccaaggacgcctacctgaatatcgtcgtgggcaactgctaccacgtcaagttcaccatcaatccgctgatgttcatccggggcaaccaggacaaccggcggtactctctgaagcccgaggtgttctacgcccacgacattaagcggaacggggagattgcttggctggccggcgataatggcaccatggccacagtgaagagagtgatgcagaaaaacaacgtgctgttcacccggctggccgtggaaggcaaaggcgagctgttcaagcagaaccctctgaaggccaagagcggccagctgcctcttaaagccggcctgagcatcgataagtatggcggctacgactccctgagcaccgcctattttgccctggtggaatccgagggcaagaaaggcgccgtgcagtttacaatcgaggccattcctctggtgtacgccaaacagggcgaagccaccatcaagaaatacctgacagaggtggtgcagctgtgcaagcccgagatcaaagtgatgcggatcaagaagtactccctgctgaagatcaatggcttccccatgcacatctccggcagaaccggaaagcagctgatcttctacgtggccagccagctgtgtatcgacgagaacagcgtggcctatctgaagaaagccctgaagtatgagagcaacctcgaggaaaacgaggccatcctggccgataagaatgccgacgagtccatgaagcagaaagccttcaaccggctcatgttctacaaggacacctggggaatcagcgccgaggctaacctgcagctgtacgatatgctgctggctaagagcgccaacaacctctacaagaacagacccgccagccagaccgccactctgaaagagaagagagagcagttcgccaagctgagcctgagcaagcagatccacgtgatcaaagagatcctgaacctgttcaagtgcgcctccgccagcgccgatttcaagctgcttgataagggcgctgcctgcggcatcctgaaagtgtccaacaacatcaccaagctgaagcagtgcgtgctgatcaatcagagccccaccggcgtgttcgagcaagaggttgacctgatgagactgcctaggggcggcggaggcagctacccctatgatgtacctgattatgcttctggcggacccaagaagaagaggaaagtcggtggttctcctaagaaaaagagaaaggtcggatccggc

SEQ ID NO: 1847 - DNA, 1173 bp, synthetic construct
  source 1..1173: mol_type = other DNA; note = mammalian_codon_optimized_EC86
gctagcgccaccatgtacccctatgatgtacctgattatgcttctggcggcagcagcggcggctcaagcggaagtgaaacacctggaacttccgaaagcgctacgcctgaatcttctggtggatcttctggcggatcttccgcatgcatgaaatccgccgagtacttgaatacatttcgccttagaaatcttggactgccagttatgaacaatctccatgatatgagcaaggccactcgaattagcgtggagactctgagattgctgatctacacggcagactttcgatatcgcatctacaccgtcgagaaaaaaggccccgaaaaacgaatgcggaccatctatcagcccagcagggagcttaaggcactccaaggctgggtcctcaggaacattctggacaaactgagtagttcccctttctccattggattcgaaaagcaccagtctatcctcaacaatgccacgccacacatcggcgctaatttcatcctgaacattgatctggaagatttcttcccttccctgactgccaataaggtgttcggcgtttttcactcactgggctacaacaggctcatctcttccgtgttgacaaagatctgttgctataagaatctgctccctcagggagctcctagctcaccgaaactggccaacctgatctgttctaaactggactatcgcatacaagggtacgcggggagcaggggtcttatctatacacggtacgctgatgatctgacactgagcgcccagtccatgaagaaggtggtaaaagctagggactttcttttttcaattattcccagtgaaggtctcgttatcaactctaagaaaacttgcatttcaggcccccggtctcagcggaaagtaaccgggctggtgatatcccaggagaaggtgggaatagggagagagaagtataaagaaatcagagcgaagattcatcatatcttttgcgggaagagttctgaaatagagcacgtccggggatggttgagcttcatcctctccgtggacagcaagagtcaccgcagacttattacctacatttcaaaactcgagaagaagtacggtaaaaatccattgaacaaggcaaagacccctaggcctaagaagaaaagaaaggtgggtggttctcctaagaaaaagagaaaggtctgagaattc

SEQ ID NO: 1848 - RNA, 136 nt, synthetic construct
  source 1..136: mol_type = other RNA; note chemically_modified_guide_G-to-T-transversion_PBS_8_C2D2_sc affold_AAVS1_71-2_target
  modified_base 1..3: mod_base = OTHER; note = 2'O-methyl ribonucleotide
  modified_base 1..4: mod_base = OTHER; note = phosphorothioate linkage
  modified_base 133..135: mod_base = OTHER; note = 2'O-methyl ribonucleotide
  modified_base 132..135: mod_base = OTHER; note = phosphorothioate linkage
tctgggagagggtagcgcagggtggtttgagagtgagaaatcacgagttcaaaaaacatgatttattcaaaccgtcttcttcggaaggccccacagtgtgtggtgcccggttctcagtggacaccctgcgcttttt

SEQ ID NO: 1849 - RNA, 138 nt, synthetic construct
  source 1..138: mol_type = other RNA; note chemically_modified_guide_G-to-T-transversion_PBS_10_C2D2_s caffold_AAVS1_71-2_target
  modified_base 1..3: mod_base = OTHER; note = 2'O-methyl ribonucleotide
  modified_base 1..4: mod_base = OTHER; note = phosphorothioate linkage
  modified_base 136..138: mod_base = OTHER; note = 2'O-methyl ribonucleotide
  modified_base 135..138: mod_base = OTHER; note = phosphorothioate linkage
tctgggagagggtagcgcagggtggtttgagagtgagaaatcacgagttcaaaaaacatgatttattcaaaccgtcttcttcggaaggccccacagtgtgtggtgcccggttctcagtggacaccctgcgctactttt

SEQ ID NO: 1850 - RNA, 141 nt, synthetic construct
  source 1..141: mol_type = other RNA; note chemically_modified_guide_G-to-T-transversion_PBS_13_C2D2_s caffold_AAVS1_71-2_target
  modified_base 1..3: mod_base = OTHER; note = 2'O-methyl ribonucleotide
  modified_base 1..4: mod_base = OTHER; note = phosphorothioate linkage
  modified_base 138..140: mod_base = OTHER; note = 2'O-methyl ribonucleotide
  modified_base 137..140: mod_base = OTHER; note = phosphorothioate linkage
tctgggagagggtagcgcagggtggtttgagagtgagaaatcacgagttcaaaaaacatgatttattcaaaccgtcttcttcggaaggccccacagtgtgtggtgcccggttctcagtggacaccctgcgctacccttttt

SEQ ID NO: 1851 - RNA, 144 nt, synthetic construct
  source 1..144: mol_type = other RNA; note chemically_modified_guide_G-to-T-transversion_PBS_16_C2D2_s caffold_AAVS1_71-2_target
  modified_base 1..3: mod_base = OTHER; note = 2'O-methyl ribonucleotide
  modified_base 1..4: mod_base = OTHER; note = phosphorothioate linkage
  modified_base 142..144: mod_base = OTHER; note = 2'O-methyl ribonucleotide
  modified_base 141..144: mod_base = OTHER; note = phosphorothioate linkage
tctgggagagggtagcgcagggtggtttgagagtgagaaatcacgagttcaaaaaacatgatttattcaaaccgtcttcttcggaaggccccacagtgtgtggtgcccggttctcagtggacaccctgcgctaccctctctttt

SEQ ID NO: 1852 - RNA, 136 nt, synthetic construct
  source 1..136: mol_type = other RNA; note chemically_modified_guide_15nt_deletion_PBS_8_C2D2_scaffold _AAVS1_71-2_target
  modified_base 1..3: mod_base = OTHER; note = 2'O-methyl ribonucleotide
  modified_base 1..4: mod_base = OTHER; note = phosphorothioate linkage
  modified_base 133..135: mod_base = OTHER; note = 2'O-methyl ribonucleotide
  modified_base 132..135: mod_base = OTHER; note = phosphorothioate linkage
tctgggagagggtagcgcagggtggtttgagagtgagaaatcacgagttcaaaaaacatgatttattcaaaccgtcttcttcggaaggccccacagtgtgtgggggggatgcgtgacctgcccgcctgcgcttttt

SEQ ID NO: 1853 - RNA, 138 nt, synthetic construct
  source 1..138: mol_type = other RNA; note chemically_modified_guide_15nt_deletion_PBS_10_C2D2_scaffol d_AAVS1_71-2_target
  modified_base 1..3: mod_base = OTHER; note = 2'O-methyl ribonucleotide
  modified_base 1..4: mod_base = OTHER; note = phosphorothioate linkage
  modified_base 136..138: mod_base = OTHER; note = 2'O-methyl ribonucleotide
  modified_base 135..138: mod_base = OTHER; note = phosphorothioate linkage
tctgggagagggtagcgcagggtggtttgagagtgagaaatcacgagttcaaaaaacatgatttattcaaaccgtcttcttcggaaggccccacagtgtgtgggggggatgcgtgacctgcccgcctgcgctactttt

SEQ ID NO: 1854 - RNA, 141 nt, synthetic construct
  source 1..141: mol_type = other RNA; note chemically_modified_guide_15nt_deletion_PBS_13_C2D2_scaffol d_AAVS1_71-2_target
  modified_base 1..3: mod_base = OTHER; note = 2'O-methyl ribonucleotide
  modified_base 1..4: mod_base = OTHER; note = phosphorothioate linkage
  modified_base 138..140: mod_base = OTHER; note = 2'O-methyl ribonucleotide
  modified_base 137..140: mod_base = OTHER; note = phosphorothioate linkage
tctgggagagggtagcgcagggtggtttgagagtgagaaatcacgagttcaaaaaacatgatttattcaaaccgtcttcttcggaaggccccacagtgtgtgggggggatgcgtgacctgcccgcctgcgctacccttttt

SEQ ID NO: 1855 - RNA, 144 nt, synthetic construct
  source 1..144: mol_type = other RNA; note chemically_modified_guide_15nt_deletion_PBS_16_C2D2_scaffol d_AAVS1_71-2_target
  modified_base 1..3: mod_base = OTHER; note = 2'O-methyl ribonucleotide
  modified_base 1..4: mod_base = OTHER; note = phosphorothioate linkage
  modified_base 142..144: mod_base = OTHER; note = 2'O-methyl ribonucleotide
  modified_base 141..144: mod_base = OTHER; note = phosphorothioate linkage
tctgggagagggtagcgcagggtggtttgagagtgagaaatcacgagttcaaaaaacatgatttattcaaaccgtcttcttcggaaggccccacagtgtgtgggggggatgcgtgacctgcccgcctgcgctaccctctctttt

SEQ ID NO: 1856 - DNA, 5178 bp, synthetic construct
  source 1..5178: mol_type = other DNA; note mammalian_codon_optimized_tethered_system_MG160-491_H230R_M G71-2n
atgaagaggaccgctgatggttccgaatttgaatctcctaagaagaaacgaaaggttatgactcaaaaatggacccaccgctaccagctgaagcctggtcgctgggtgttcgccccaacagatgaggccaagaagacgggagccagaattaagcgggccgtcgaggctcattggaaaccgcccaacttttactttcatctgaggaacgggggtcacgtggcagctgtccgatctcacgttgcatccaagtatttctttcgagctgatcttgacgacttctttggcagggtgaatagatctcgagtcaccagatgccttaaaagttggttcagttacgccgaagcccgcgagatggcttccgagtctgttgttaagaggcctggacatgaggggtttgtgctgccctacggattcgtccaaagtccaatcttggcatccctggctcttgacaagagtaaactcggctcttatttgcggaagctcaatgggcggtcagacctgaccgtcagcgtgtatgtagacgacataatcatctccagcgatgatgaatcacagctgggcgaggtggccgaaaggctgaaacagctggcggataaggccctttttccattgagcgcgtctaaaactgaggggcccgcggaagaagtgaccgcattcaacattgaactcagccacgctgccctgcggattacagatgagagaatggctgaactccgcgccgactatcagagcgcaacatccgagaggtcaaaagcaggcatcctcggctacgtagacagcgtgaatcctgctcaggcagcctcactgaagtctggcggcagcagcggcggctcaagcggaagtgaaacacctggaacttccgaaagcgctacgcctgaatcttctggtggatcttctggcggatcttccgcatgccagaacaagaagaacgtcgactactacgtcggcctggacatgggagatgcctctgttggatgggccgtgaccgacctgaactacaacatcctgaagttcaacggcaaggccctgtggggcatcagactgttcgattctgccgaaaccgccgctgccagaagaggctttagatctgccaggcggcggatcgacagagtgtcttggagaatctccatgctgcaagagctgttcgccgacgagatcgccaaagtggatgccggcttcttccagcggctgaaggatagcagactgcaggtcgaggacaagcaagagaaaaccgcctacaacctgttcgtgggccagaactacaccgacaaggacttctaccagcagtaccccaccatgtaccacctgagatacgccctggctacacaggccggaccttttgatgtgcggctgctgtatctggccgtgcagcacatcgtgaagcaccggggccactttctgttcgagaacctggacgccagcaaagtgggcgatttcgtggccgtgtttggcgaggtggaaagctacgtgcacgacgagatggaactggacgagtggtactgccacgacatcgatgccctggccaaggtgctgtgcaatgccaatctgggcatcaccgccaagcagaaggccatccagaatctgctgcccgccaagaccaagcaagaaaaggccatcgtgcagctgctgagcggcggaaaggccaagctgtgcgacctgttctgtgacgaggaactggccgaatgcgagaaaaagagcatcagcttccaagaggacaacctcgatgagctggaacccatcctggaagctatcctgcaagagagatacgaggccctgctgcggttcaaggccgtgtatgattggagcctgctggccaagatcctgagactggacgccgacaagaaaagcgagaacgagatgcacctcctgagcgagtgcaaagtgaaggtgtacgaggaacacaagaaagacctggctgtgctgaagtccatgctgaagggcaagcccctgtacaacaagctgttcagacaggacggcgaggacacctacgccaattacgcccagggaatcaaagggatcaaccaggtggacttctgcaagtccctgaagaagcagctggaatctatcggcgagtacaagaaacagatgcagcagctgaccagcttcgaggacgcccagaccgatgtggaaagactgctgtttagagtggccaacggcctggctttccccaagcagaccaccaaggacaacggcatcatcccaatccaggttcacctggccgagctgcagtgtatcctggctcacgccgagaagtacctgcctttcctgaagaacgccgacgccaatggcctgagcgtgcgggaaaagatcacccagatcgtgaagttcagaatcccctactacgtgggacccctggccggcacaagactgtctagagaacagggcagatgctgggtcgagcggagagccgagctgaagaatgagaagatctacccctggaacttcgacaaggtggtggacctggaagcctccgccgagaacttcatcaccaacatgaccgccaagtgcacctacctcgtgggcgaagatgtgctccccaaagagtccctgctgtactccgagttcatggtccgaaacgccctgaacaacctgaccatcgacggcgagagactgcccgtttctctgctgcagaaaatctacaagcagctgttcctggaaaagaccttcaaagtgaccaagaaggccctggaacggttcttcaaacaagagaatgtgtcctaccacgatatcggcggcatcgacgacaagatcaacgcctccatgaaggcctacaacgacttcaagcggatcttcggcgaggcctacatcgaaatgcaccgggatgagatcgagaacatcatccggtggatcaccctgttttgcgacgagaagaagatgctcgagacaaagatccgcaagacgtaccctcagatccccgatgataagatcaaggccattaagaagctgaagtacaaggactggggcagactgagcgccacactgctggattctggcaagatcgcctacgaggatgccagcgtgggcgagagaatcaccatcatctctgccctgcggcacaccaacaagaatttcatggaactgctgagcagcaactgccagtacgacttcatcggcaagattaaggacttcaacggctccaagcagagcgacaatggcaagctgacctacaaggatgtggaagaactgtacgtgtcccctagcgtgaagcggagcatctggcagaccctgaccattctggaagagatcaagaaaatcatgggctgcgagcccaagcgcatcttcatcgagatggccagaagcaaagaggaaagcctgcggaccaacagcaggctgcagagactccaggacctgtacaagaagtgcaaagaagagaacatcgacttcatgcccaaggccgacgagctgaccgacatcagatctcagctccagtgcaagaacgaagaggacctgcggagcgacaagctgtacctgtactacacccagatggggagatgcatgtacaccggcgagaggatcgaactggccagcctgtacgaccagaacaaatacgacgtggacgccatctaccccaggtctaagaccaaggacgacagcctgaacaatcgggtgctcgtgaagaaagagattaacagcgccaagacagacaactaccccatcgacgctgacatccggaagaaaatgcacgccttttggaagatgctgtacgacaagggcttcatcgaccaaaagaagtacgagcggctgaccagaagcacccagctgacagatgaagaactggctggcttcatcaaccggcagctggtggaaaccagacagagcacaaaggccaccgccgacattctgaagtctgcctacgagcacagcgaggtggtgtatgtgaaggccggcaacgtgtccgatttccggcagcagttcgacttcgtgaagtgccgggaagtgaacgacctgcaccacgccaaggacgcctacctgaatatcgtcgtgggcaactgctaccacgtcaagttcaccatcaatccgctgatgttcatccggggcaaccaggacaaccggcggtactctctgaagcccgaggtgttctacgcccacgacattaagcggaacggggagattgcttggctggccggcgataatggcaccatggccacagtgaagagagtgatgcagaaaaacaacgtgctgttcacccggctggccgtggaaggcaaaggcgagctgttcaagcagaaccctctgaaggccaagagcggccagctgcctcttaaagccggcctgagcatcgataagtatggcggctacgactccctgagcaccgcctattttgccctggtggaatccgagggcaagaaaggcgccgtgcagtttacaatcgaggccattcctctggtgtacgccaaacagggcgaagccaccatcaagaaatacctgacagaggtggtgcagctgtgcaagcccgagatcaaagtgatgcggatcaagaagtactccctgctgaagatcaatggcttccccatgcacatctccggcagaaccggaaagcagctgatcttctacgtggccagccagctgtgtatcgacgagaacagcgtggcctatctgaagaaagccctgaagtatgagagcaacctcgaggaaaacgaggccatcctggccgataagaatgccgacgagtccatgaagcagaaagccttcaaccggctcatgttctacaaggacacctggggaatcagcgccgaggctaacctgcagctgtacgatatgctgctggctaagagcgccaacaacctctacaagaacagacccgccagccagaccgccactctgaaagagaagagagagcagttcgccaagctgagcctgagcaagcagatccacgtgatcaaagagatcctgaacctgttcaagtgcgcctccgccagcgccgatttcaagctgcttgataagggcgctgcctgcggcatcctgaaagtgtccaacaacatcaccaagctgaagcagtgcgtgctgatcaatcagagccccaccggcgtgttcgagcaagaggttgacctgatgagactgcctaggggcggcggaggcagctacccctatgatgtacctgattatgcttctggcggacccaagaagaagaggaaagtcggtggttctcctaagaaaaagagaaaggtcggatccggc

SEQ ID NO: 1857 - DNA, 5178 bp, synthetic construct
  source 1..5178: mol_type = other DNA; note mammalian_codon_optimized_tethered_system_MG160-492_H230R_M G71-2n
atgaagaggaccgctgatggttccgaatttgaatctcctaagaagaaacgaaaggttatgactcaaaagtggacacatcgataccagctgaaacccgggcgctgggtattcgctcctaccgatgaagctaaaaaaacaggcgccagaatcaagcgagccgtggcagcccactggaagccgccaaatttttactttcatctgcgaaacggcggccacgtggctgccgtcaggagtcacgtggccagcaagtacttcttccgggccgacctcgatgacttttttggacgggtgaatcgctcccgcgtgactcggtgcctgaagtcttggttcagctacgcagaggcccgcgaaatggcgtcagagtccgtggtgaaaaggccaggtcacaacgggttcgtcctgccttatgggtttgttcagtcacctattttggcctcattggccctggacaaaagtaaactgggctcctaccttagaaagctgaacggcagatccgacctcaccgtttccgtttatgtcgatgatataattatctcctctgacgatgagagccagctgggagaggtagccgctagattgaaacagctcgcagataaggcactcttccccctttcagctagtaagacagaggggcccgcttctggtgtgacggcctttaacattgagctttctcacgctgcacttaggatcaccgacgaacggctcgcggaactcagggcggactatcaagccgctgctagtgaaaggagcaaggcaggaatcctgagctatgtccattctgtcaatcccgcacaggcggccagcctgaagtctggcggcagcagcggcggctcaagcggaagtgaaacacctggaacttccgaaagcgctacgcctgaatcttctggtggatcttctggcggatcttccgcatgccagaacaagaagaacgtcgactactacgtcggcctggacatgggagatgcctctgttggatgggccgtgaccgacctgaactacaacatcctgaagttcaacggcaaggccctgtggggcatcagactgttcgattctgccgaaaccgccgctgccagaagaggctttagatctgccaggcggcggatcgacagagtgtcttggagaatctccatgctgcaagagctgttcgccgacgagatcgccaaagtggatgccggcttcttccagcggctgaaggatagcagactgcaggtcgaggacaagcaagagaaaaccgcctacaacctgttcgtgggccagaactacaccgacaaggacttctaccagcagtaccccaccatgtaccacctgagatacgccctggctacacaggccggaccttttgatgtgcggctgctgtatctggccgtgcagcacatcgtgaagcaccggggccactttctgttcgagaacctggacgccagcaaagtgggcgatttcgtggccgtgtttggcgaggtggaaagctacgtgcacgacgagatggaactggacgagtggtactgccacgacatcgatgccctggccaaggtgctgtgcaatgccaatctgggcatcaccgccaagcagaaggccatccagaatctgctgcccgccaagaccaagcaagaaaaggccatcgtgcagctgctgagcggcggaaaggccaagctgtgcgacctgttctgtgacgaggaactggccgaatgcgagaaaaagagcatcagcttccaagaggacaacctcgatgagctggaacccatcctggaagctatcctgcaagagagatacgaggccctgctgcggttcaaggccgtgtatgattggagcctgctggccaagatcctgagactggacgccgacaagaaaagcgagaacgagatgcacctcctgagcgagtgcaaagtgaaggtgtacgaggaacacaagaaagacctggctgtgctgaagtccatgctgaagggcaagcccctgtacaacaagctgttcagacaggacggcgaggacacctacgccaattacgcccagggaatcaaagggatcaaccaggtggacttctgcaagtccctgaagaagcagctggaatctatcggcgagtacaagaaacagatgcagcagctgaccagcttcgaggacgcccagaccgatgtggaaagactgctgtttagagtggccaacggcctggctttccccaagcagaccaccaaggacaacggcatcatcccaatccaggttcacctggccgagctgcagtgtatcctggctcacgccgagaagtacctgcctttcctgaagaacgccgacgccaatggcctgagcgtgcgggaaaagatcacccagatcgtgaagttcagaatcccctactacgtgggacccctggccggcacaagactgtctagagaacagggcagatgctgggtcgagcggagagccgagctgaagaatgagaagatctacccctggaacttcgacaaggtggtggacctggaagcctccgccgagaacttcatcaccaacatgaccgccaagtgcacctacctcgtgggcgaagatgtgctccccaaagagtccctgctgtactccgagttcatggtccgaaacgccctgaacaacctgaccatcgacggcgagagactgcccgtttctctgctgcagaaaatctacaagcagctgttcctggaaaagaccttcaaagtgaccaagaaggccctggaacggttcttcaaacaagagaatgtgtcctaccacgatatcggcggcatcgacgacaagatcaacgcctccatgaaggcctacaacgacttcaagcggatcttcggcgaggcctacatcgaaatgcaccgggatgagatcgagaacatcatccggtggatcaccctgttttgcgacgagaagaagatgctcgagacaaagatccgcaagacgtaccctcagatccccgatgataagatcaaggccattaagaagctgaagtacaaggactggggcagactgagcgccacactgctggattctggcaagatcgcctacgaggatgccagcgtgggcgagagaatcaccatcatctctgccctgcggcacaccaacaagaatttcatggaactgctgagcagcaactgccagtacgacttcatcggcaagattaaggacttcaacggctccaagcagagcgacaatggcaagctgacctacaaggatgtggaagaactgtacgtgtcccctagcgtgaagcggagcatctggcagaccctgaccattctggaagagatcaagaaaatcatgggctgcgagcccaagcgcatcttcatcgagatggccagaagcaaagaggaaagcctgcggaccaacagcaggctgcagagactccaggacctgtacaagaagtgcaaagaagagaacatcgacttcatgcccaaggccgacgagctgaccgacatcagatctcagctccagtgcaagaacgaagaggacctgcggagcgacaagctgtacctgtactacacccagatggggagatgcatgtacaccggcgagaggatcgaactggccagcctgtacgaccagaacaaatacgacgtggacgccatctaccccaggtctaagaccaaggacgacagcctgaacaatcgggtgctcgtgaagaaagagattaacagcgccaagacagacaactaccccatcgacgctgacatccggaagaaaatgcacgccttttggaagatgctgtacgacaagggcttcatcgaccaaaagaagtacgagcggctgaccagaagcacccagctgacagatgaagaactggctggcttcatcaaccggcagctggtggaaaccagacagagcacaaaggccaccgccgacattctgaagtctgcctacgagcacagcgaggtggtgtatgtgaaggccggcaacgtgtccgatttccggcagcagttcgacttcgtgaagtgccgggaagtgaacgacctgcaccacgccaaggacgcctacctgaatatcgtcgtgggcaactgctaccacgtcaagttcaccatcaatccgctgatgttcatccggggcaaccaggacaaccggcggtactctctgaagcccgaggtgttctacgcccacgacattaagcggaacggggagattgcttggctggccggcgataatggcaccatggccacagtgaagagagtgatgcagaaaaacaacgtgctgttcacccggctggccgtggaaggcaaaggcgagctgttcaagcagaaccctctgaaggccaagagcggccagctgcctcttaaagccggcctgagcatcgataagtatggcggctacgactccctgagcaccgcctattttgccctggtggaatccgagggcaagaaaggcgccgtgcagtttacaatcgaggccattcctctggtgtacgccaaacagggcgaagccaccatcaagaaatacctgacagaggtggtgcagctgtgcaagcccgagatcaaagtgatgcggatcaagaagtactccctgctgaagatcaatggcttccccatgcacatctccggcagaaccggaaagcagctgatcttctacgtggccagccagctgtgtatcgacgagaacagcgtggcctatctgaagaaagccctgaagtatgagagcaacctcgaggaaaacgaggccatcctggccgataagaatgccgacgagtccatgaagcagaaagccttcaaccggctcatgttctacaaggacacctggggaatcagcgccgaggctaacctgcagctgtacgatatgctgctggctaagagcgccaacaacctctacaagaacagacccgccagccagaccgccactctgaaagagaagagagagcagttcgccaagctgagcctgagcaagcagatccacgtgatcaaagagatcctgaacctgttcaagtgcgcctccgccagcgccgatttcaagctgcttgataagggcgctgcctgcggcatcctgaaagtgtccaacaacatcaccaagctgaagcagtgcgtgctgatcaatcagagccccaccggcgtgttcgagcaagaggttgacctgatgagactgcctaggggcggcggaggcagctacccctatgatgtacctgattatgcttctggcggacccaagaagaagaggaaagtcggtggttctcctaagaaaaagagaaaggtcggatccggc

SEQ ID NO: 1858 - DNA, 5178 bp, synthetic construct
  source 1..5178: mol_type = other DNA; note mammalian_codon_optimized_tethered_system_MG160-493_H230R_M G71-2n
atgaagaggaccgctgatggttccgaatttgaatctcctaagaagaaacgaaaggttatgtcccagaaatggactcatcggtttgaaatcaagcccggaaagtgggtgtttgtgccttctgacgagtctaggcagcatggaaaaaagattaaaaaacagatcgagaagcgctggaagccgcctgactactactaccacctgaggaatggcggccacgtcgctgcacttaagagtcatcttaataataagtatttcctgcgcctcgatataaagaacttcttcggtagcattaatagatcaagggtgactagagcacttaagaagtttttcagctatgaagaggccagagagattgccaatgaatctaccgtacggcaccccaacaataagaagtacatactgccatttgggttcgtccagagcccaatcttggcctcactttgcctcgataagagtgctctgggccgatacctgcacaaactcaacaaaaacaacggcatcaccgtcagcgtttatatggacgacattattatctcttcaaacgatcaagaacagttgcaagaggtgttggaagagatcaaaacggccgccgaaaaaagcgggtttcctctgaatgaggagaaaacacagggaccatccgataagatcaccgccttcaatatcgagctgtcccacgggaatctcaaaattacagacgagcgcatgaacgagtttatggaagcgtacaaaaactccaactccgagaggcagcgagaaggcatacttaactatgttcggagtgtgaaccccgctcaagctgaacagctggcatctggcggcagcagcggcggctcaagcggaagtgaaacacctggaacttccgaaagcgctacgcctgaatcttctggtggatcttctggcggatcttccgcatgccagaacaagaagaacgtcgactactacgtcggcctggacatgggagatgcctctgttggatgggccgtgaccgacctgaactacaacatcctgaagttcaacggcaaggccctgtggggcatcagactgttcgattctgccgaaaccgccgctgccagaagaggctttagatctgccaggcggcggatcgacagagtgtcttggagaatctccatgctgcaagagctgttcgccgacgagatcgccaaagtggatgccggcttcttccagcggctgaaggatagcagactgcaggtcgaggacaagcaagagaaaaccgcctacaacctgttcgtgggccagaactacaccgacaaggacttctaccagcagtaccccaccatgtaccacctgagatacgccctggctacacaggccggaccttttgatgtgcggctgctgtatctggccgtgcagcacatcgtgaagcaccggggccactttctgttcgagaacctggacgccagcaaagtgggcgatttcgtggccgtgtttggcgaggtggaaagctacgtgcacgacgagatggaactggacgagtggtactgccacgacatcgatgccctggccaaggtgctgtgcaatgccaatctgggcatcaccgccaagcagaaggccatccagaatctgctgcccgccaagaccaagcaagaaaaggccatcgtgcagctgctgagcggcggaaaggccaagctgtgcgacctgttctgtgacgaggaactggccgaatgcgagaaaaagagcatcagcttccaagaggacaacctcgatgagctggaacccatcctggaagctatcctgcaagagagatacgaggccctgctgcggttcaaggccgtgtatgattggagcctgctggccaagatcctgagactggacgccgacaagaaaagcgagaacgagatgcacctcctgagcgagtgcaaagtgaaggtgtacgaggaacacaagaaagacctggctgtgctgaagtccatgctgaagggcaagcccctgtacaacaagctgttcagacaggacggcgaggacacctacgccaattacgcccagggaatcaaagggatcaaccaggtggacttctgcaagtccctgaagaagcagctggaatctatcggcgagtacaagaaacagatgcagcagctgaccagcttcgaggacgcccagaccgatgtggaaagactgctgtttagagtggccaacggcctggctttccccaagcagaccaccaaggacaacggcatcatcccaatccaggttcacctggccgagctgcagtgtatcctggctcacgccgagaagtacctgcctttcctgaagaacgccgacgccaatggcctgagcgtgcgggaaaagatcacccagatcgtgaagttcagaatcccctactacgtgggacccctggccggcacaagactgtctagagaacagggcagatgctgggtcgagcggagagccgagctgaagaatgagaagatctacccctggaacttcgacaaggtggtggacctggaagcctccgccgagaacttcatcaccaacatgaccgccaagtgcacctacctcgtgggcgaagatgtgctccccaaagagtccctgctgtactccgagttcatggtccgaaacgccctgaacaacctgaccatcgacggcgagagactgcccgtttctctgctgcagaaaatctacaagcagctgttcctggaaaagaccttcaaagtgaccaagaaggccctggaacggttcttcaaacaagagaatgtgtcctaccacgatatcggcggcatcgacgacaagatcaacgcctccatgaaggcctacaacgacttcaagcggatcttcggcgaggcctacatcgaaatgcaccgggatgagatcgagaacatcatccggtggatcaccctgttttgcgacgagaagaagatgctcgagacaaagatccgcaagacgtaccctcagatccccgatgataagatcaaggccattaagaagctgaagtacaaggactggggcagactgagcgccacactgctggattctggcaagatcgcctacgaggatgccagcgtgggcgagagaatcaccatcatctctgccctgcggcacaccaacaagaatttcatggaactgctgagcagcaactgccagtacgacttcatcggcaagattaaggacttcaacggctccaagcagagcgacaatggcaagctgacctacaaggatgtggaagaactgtacgtgtcccctagcgtgaagcggagcatctggcagaccctgaccattctggaagagatcaagaaaatcatgggctgcgagcccaagcgcatcttcatcgagatggccagaagcaaagaggaaagcctgcggaccaacagcaggctgcagagactccaggacctgtacaagaagtgcaaagaagagaacatcgacttcatgcccaaggccgacgagctgaccgacatcagatctcagctccagtgcaagaacgaagaggacctgcggagcgacaagctgtacctgtactacacccagatggggagatgcatgtacaccggcgagaggatcgaactggccagcctgtacgaccagaacaaatacgacgtggacgccatctaccccaggtctaagaccaaggacgacagcctgaacaatcgggtgctcgtgaagaaagagattaacagcgccaagacagacaactaccccatcgacgctgacatccggaagaaaatgcacgccttttggaagatgctgtacgacaagggcttcatcgaccaaaagaagtacgagcggctgaccagaagcacccagctgacagatgaagaactggctggcttcatcaaccggcagctggtggaaaccagacagagcacaaaggccaccgccgacattctgaagtctgcctacgagcacagcgaggtggtgtatgtgaaggccggcaacgtgtccgatttccggcagcagttcgacttcgtgaagtgccgggaagtgaacgacctgcaccacgccaaggacgcctacctgaatatcgtcgtgggcaactgctaccacgtcaagttcaccatcaatccgctgatgttcatccggggcaaccaggacaaccggcggtactctctgaagcccgaggtgttctacgcccacgacattaagcggaacggggagattgcttggctggccggcgataatggcaccatggccacagtgaagagagtgatgcagaaaaacaacgtgctgttcacccggctggccgtggaaggcaaaggcgagctgttcaagcagaaccctctgaaggccaagagcggccagctgcctcttaaagccggcctgagcatcgataagtatggcggctacgactccctgagcaccgcctattttgccctggtggaatccgagggcaagaaaggcgccgtgcagtttacaatcgaggccattcctctggtgtacgccaaacagggcgaagccaccatcaagaaatacctgacagaggtggtgcagctgtgcaagcccgagatcaaagtgatgcggatcaagaagtactccctgctgaagatcaatggcttccccatgcacatctccggcagaaccggaaagcagctgatcttctacgtggccagccagctgtgtatcgacgagaacagcgtggcctatctgaagaaagccctgaagtatgagagcaacctcgaggaaaacgaggccatcctggccgataagaatgccgacgagtccatgaagcagaaagccttcaaccggctcatgttctacaaggacacctggggaatcagcgccgaggctaacctgcagctgtacgatatgctgctggctaagagcgccaacaacctctacaagaacagacccgccagccagaccgccactctgaaagagaagagagagcagttcgccaagctgagcctgagcaagcagatccacgtgatcaaagagatcctgaacctgttcaagtgcgcctccgccagcgccgatttcaagctgcttgataagggcgctgcctgcggcatcctgaaagtgtccaacaacatcaccaagctgaagcagtgcgtgctgatcaatcagagccccaccggcgtgttcgagcaagaggttgacctgatgagactgcctaggggcggcggaggcagctacccctatgatgtacctgattatgcttctggcggacccaagaagaagaggaaagtcggtggttctcctaagaaaaagagaaaggtcggatccggc

SEQ ID NO: 1859 - DNA, 4149 bp, synthetic construct
  source 1..4149: mol_type = other DNA; note = mammalian_codon_optimized_MG71-30
cagaacaagaagaacgtcgactactacgtcggcctggacatgggagatgcctctgttggatgggccgtgaccgacctgaactacaacatcctgaagttcaacggcaaggccctgtggggcatcagactgttcgattctgccgaaaccgccgctgccagaagaggctttagatctgccaggcggcggatcgacagagtgtcttggagaatctccatgctgcaagagctgttcgccgacgagatcgccaaagtggatgccggcttcttccagcggctgaaggatagcagactgcaggtcgaggacaagcaagagaaaaccgcctacaacctgttcgtgggccagaactacaccgacaaggacttctaccagcagtaccccaccatgtaccacctgagatacgccctggctacacaggccggaccttttgatgtgcggctgctgtatctggccgtgcagcacatcgtgaagcaccggggccactttctgttcgagaacctggacgccagcaaagtgggcgatttcgtggccgtgtttggcgaggtggaaagctacgtgcacgacgagatggaactggacgagtggtactgccacgacatcgatgccctggccaaggtgctgtgcaatgccaatctgggcatcaccgccaagcagaaggccatccagaatctgctgcccgccaagaccaagcaagaaaaggccatcgtgcagctgctgagcggcggaaaggccaagctgtgcgacctgttctgtgacgaggaactggccgaatgcgagaaaaagagcatcagcttccaagaggacaacctcgatgagctggaacccatcctggaagctatcctgcaagagagatacgaggccctgctgcggttcaaggccgtgtatgattggagcctgctggccaagatcctgagactggacgccgacaagaaaagcgagaacgagatgcacctcctgagcgagtgcaaagtgaaggtgtacgaggaacacaagaaagacctggctgtgctgaagtccatgctgaagggcaagcccctgtacaacaagctgttcagacaggacggcgaggacacctacgccaattacgcccagggaatcaaagggatcaaccaggtggacttctgcaagtccctgaagaagcagctggaatctatcggcgagtacaagaaacagatgcagcagctgaccagcttcgaggacgcccagaccgatgtggaaagactgctgtttagagtggccaacggcctggctttccccaagcagaccaccaaggacaacggcatcatcccaatccaggttcacctggccgagctgcagtgtatcctggctcacgccgagaagtacctgcctttcctgaagaacgccgacgccaatggcctgagcgtgcgggaaaagatcacccagatcgtgaagttcagaatcccctactacgtgggacccctggccggcacaagactgtctagagaacagggcagatgctgggtcgagcggagagccgagctgaagaatgagaagatctacccctggaacttcgacaaggtggtggacctggaagcctccgccgagaacttcatcaccaacatgaccgccaagtgcacctacctcgtgggcgaagatgtgctccccaaagagtccctgctgtactccgagttcatggtccgaaacgccctgaacaacctgaccatcgacggcgagagactgcccgtttctctgctgcagaaaatctacaagcagctgttcctggaaaagaccttcaaagtgaccaagaaggccctggaacggttcttcaaacaagagaatgtgtcctaccacgatatcggcggcatcgacgacaagatcaacgcctccatgaaggcctacaacgacttcaagcggatcttcggcgaggcctacatcgaaatgcaccgggatgagatcgagaacatcatccggtggatcaccctgttttgcgacgagaagaagatgctcgagacaaagatccgcaagacgtaccctcagatccccgatgataagatcaaggccattaagaagctgaagtacaaggactggggcagactgagcgccacactgctggattctggcaagatcgcctacgaggatgccagcgtgggcgagagaatcaccatcatctctgccctgcggcacaccaacaagaatttcatggaactgctgagcagcaactgccagtacgacttcatcggcaagattaaggacttcaacggctccaagcagagcgacaatggcaagctgacctacaaggatgtggaagaactgtacgtgtcccctagcgtgaagcggagcatctggcagaccctgaccattctggaagagatcaagaaaatcatgggctgcgagcccaagcgcatcttcatcgagatggccagaagcaaagaggaaagcctgcggaccaacagcaggctgcagagactccaggacctgtacaagaagtgcaaagaagagaacatcgacttcatgcccaaggccgacgagctgaccgacatcagatctcagctccagtgcaagaacgaagaggacctgcggagcgacaagctgtacctgtactacacccagatggggagatgcatgtacaccggcgagaggatcgaactggccagcctgtacgaccagaacaaatacgacgtggacgccatctaccccaggtctaagaccaaggacgacagcctgaacaatcgggtgctcgtgaagaaagagattaacagcgccaagacagacaactaccccatcgacgctgacatccggaagaaaatgcacgccttttggaagatgctgtacgacaagggcttcatcgaccaaaagaagtacgagcggctgaccagaagcacccagctgacagatgaagaactggctggcttcatcaaccggcagctggtggaaaccagacagagcacaaaggccaccgccgacattctgaagtctgcctacgagcacagcgaggtggtgtatgtgaaggccggcaacgtgtccgatttccggcagcagttcgacttcgtgaagtgccgggaagtgaacgacctgcaccacgccaaggacgcctacctgaatatcgtcgtgggcaactgctaccacgtcaagttcaccatcaatccgctgatgttcatccggggcaaccaggacaaccggcggtactctctgaagcccgaggtgttctacgcccacgacattaagcggaacggggagattgcttggctggccggcgataatggcaccatggccacagtgaagagagtgatgcagaaaaacaacgtgctgttcacccggctggcggcagtcgaagggaaaggcgaattgtttaagcaaaacccattaaaagccaacagcgggcaactgccattgaaagccggcctctccattgagaaatacggcggttacaactcactcactactgcatacttcgctgtggtcaagtccgagggaaagaaaggtgccgtccaactgagcatagaagctattcctttggtgtacgcgaagcaaggggaaatcgccgttcaaaattatctcaccgaagtggtgcaactctgtaaacccgaaatcatgctgtccaaaattaagaaatacagcttatttaaaatcaacggctttcctatgcatataagcgggcgtaccgataatcgaatcctcttctacggggcgggccagctgtgcattgatgaggctgacgccgactacctgaagaaagcattgaagtacgaggccgacatcgctgaaaatgaactggtgatagccgacacaaacgctgacgatatacaaaagcaaaacgcccaaaagagactcgactactacaaccagaaatggcgaattggtcgcaaaataaacatgcatatatatgacatgctgctggctaaatccggcaattctttatataagaatcgccctgcctcacagacaacggatctgcaagagcagcgcgatgttttcgagaaactgtcattggccgatcaaatacatgtcataggtgaggtcctgaaactgtttaagtgtgccagcgccagcgctaacctgaaacttcttgataaaggaaatgcctgcggagttatcaaggtgtccaacaatatcttgaaattcaagcaatgtatattgattaatcagagccccactggagtatttgagcagaaagttgatttgatgaagctg

SEQ ID NO: 1860 - DNA, 4146 bp, synthetic construct
  source 1..4146: mol_type = other DNA; note = mammalian_codon_optimized_MG71-31
cagaacaagaagaacgtcgactactacgtcggcctggacatgggagatgcctctgttggatgggccgtgaccgacctgaactacaacatcctgaagttcaacggcaaggccctgtggggcatcagactgttcgattctgccgaaaccgccgctgccagaagaggctttagatctgccaggcggcggatcgacagagtgtcttggagaatctccatgctgcaagagctgttcgccgacgagatcgccaaagtggatgccggcttcttccagcggctgaaggatagcagactgcaggtcgaggacaagcaagagaaaaccgcctacaacctgttcgtgggccagaactacaccgacaaggacttctaccagcagtaccccaccatgtaccacctgagatacgccctggctacacaggccggaccttttgatgtgcggctgctgtatctggccgtgcagcacatcgtgaagcaccggggccactttctgttcgagaacctggacgccagcaaagtgggcgatttcgtggccgtgtttggcgaggtggaaagctacgtgcacgacgagatggaactggacgagtggtactgccacgacatcgatgccctggccaaggtgctgtgcaatgccaatctgggcatcaccgccaagcagaaggccatccagaatctgctgcccgccaagaccaagcaagaaaaggccatcgtgcagctgctgagcggcggaaaggccaagctgtgcgacctgttctgtgacgaggaactggccgaatgcgagaaaaagagcatcagcttccaagaggacaacctcgatgagctggaacccatcctggaagctatcctgcaagagagatacgaggccctgctgcggttcaaggccgtgtatgattggagcctgctggccaagatcctgagactggacgccgacaagaaaagcgagaacgagatgcacctcctgagcgagtgcaaagtgaaggtgtacgaggaacacaagaaagacctggctgtgctgaagtccatgctgaagggcaagcccctgtacaacaagctgttcagacaggacggcgaggacacctacgccaattacgcccagggaatcaaagggatcaaccaggtggacttctgcaagtccctgaagaagcagctggaatctatcggcgagtacaagaaacagatgcagcagctgaccagcttcgaggacgcccagaccgatgtggaaagactgctgtttagagtggccaacggcctggctttccccaagcagaccaccaaggacaacggcatcatcccaatccaggttcacctggccgagctgcagtgtatcctggctcacgccgagaagtacctgcctttcctgaagaacgccgacgccaatggcctgagcgtgcgggaaaagatcacccagatcgtgaagttcagaatcccctactacgtgggacccctggccggcacaagactgtctagagaacagggcagatgctgggtcgagcggagagccgagctgaagaatgagaagatctacccctggaacttcgacaaggtggtggacctggaagcctccgccgagaacttcatcaccaacatgaccgccaagtgcacctacctcgtgggcgaagatgtgctccccaaagagtccctgctgtactccgagttcatggtccgaaacgccctgaacaacctgaccatcgacggcgagagactgcccgtttctctgctgcagaaaatctacaagcagctgttcctggaaaagaccttcaaagtgaccaagaaggccctggaacggttcttcaaacaagagaatgtgtcctaccacgatatcggcggcatcgacgacaagatcaacgcctccatgaaggcctacaacgacttcaagcggatcttcggcgaggcctacatcgaaatgcaccgggatgagatcgagaacatcatccggtggatcaccctgttttgcgacgagaagaagatgctcgagacaaagatccgcaagacgtaccctcagatccccgatgataagatcaaggccattaagaagctgaagtacaaggactggggcagactgagcgccacactgctggattctggcaagatcgcctacgaggatgccagcgtgggcgagagaatcaccatcatctctgccctgcggcacaccaacaagaatttcatggaactgctgagcagcaactgccagtacgacttcatcggcaagattaaggacttcaacggctccaagcagagcgacaatggcaagctgacctacaaggatgtggaagaactgtacgtgtcccctagcgtgaagcggagcatctggcagaccctgaccattctggaagagatcaagaaaatcatgggctgcgagcccaagcgcatcttcatcgagatggccagaagcaaagaggaaagcctgcggaccaacagcaggctgcagagactccaggacctgtacaagaagtgcaaagaagagaacatcgacttcatgcccaaggccgacgagctgaccgacatcagatctcagctccagtgcaagaacgaagaggacctgcggagcgacaagctgtacctgtactacacccagatggggagatgcatgtacaccggcgagaggatcgaactggccagcctgtacgaccagaacaaatacgacgtggacgccatctaccccaggtctaagaccaaggacgacagcctgaacaatcgggtgctcgtgaagaaagagattaacagcgccaagacagacaactaccccatcgacgctgacatccggaagaaaatgcacgccttttggaagatgctgtacgacaagggcttcatcgaccaaaagaagtacgagcggctgaccagaagcacccagctgacagatgaagaactggctggcttcatcaaccggcagctggtggaaaccagacagagcacaaaggccaccgccgacattctgaagtctgcctacgagcacagcgaggtggtgtatgtgaaggccggcaacgtgtccgatttccggcagcagttcgacttcgtgaagtgccgggaagtgaacgacctgcaccacgccaaggacgcctacctgaatatcgtcgtgggcaactgctaccacgtcaagttcaccatcaatccgctgatgttcatccggggcaaccaggacaaccggcggtactctctgaagcccgaggtgttctacgcccacgacattaagcggaacggggagattgcttggctggccggcgataatggcaccatggccacagtgaagagagtgatgcagaaaaacaacgtgctgttcacccggctggcagtcgaagggaaaggcgaattgtttaagcaaaacccattaaaagccaacagcgggcaactgccattgaaagccggcctctccattgagaaatacggcggttacaactcactcactactgcatacttcgctgtggtcaagtccgagggaaagaaaggtgccgtccaactgagcatagaagctattcctttggtgtacgcgaagcaaggggaaatcgccgttcaaaattatctcaccgaagtggtgcaactctgtaaacccgaaatcatgctgtccaaaattaagaaatacagcttatttaaaatcaacggctttcctatgcatataagcgggcgtaccgataatcgaatcctcttctacggggcgggccagctgtgcattgatgaggctgacgccgactacctgaagaaagcattgaagtacgaggccgacatcgctgaaaatgaactggtgatagccgacacaaacgctgacgatatacaaaagcaaaacgcccaaaagagactcgactactacaaccagaaatggcgaattggtcgcaaaataaacatgcatatatatgacatgctgctggctaaatccggcaattctttatataagaatcgccctgcctcacagacaacggatctgcaagagcagcgcgatgttttcgagaaactgtcattggccgatcaaatacatgtcataggtgaggtcctgaaactgtttaagtgtgccagcgccagcgctaacctgaaacttcttgataaaggaaatgcctgcggagttatcaaggtgtccaacaatatcttgaaattcaagcaatgtatattgattaatcagagccccactggagtatttgagcagaaagttgatttgatgaagctg

SEQ ID NO: 1861 - DNA, 4146 bp, synthetic construct
  source 1..4146: mol_type = other DNA; note = mammalian_codon_optimized_MG71-32
cagaacaagaagaacgtcgactactacgtcggcctggacatgggagatgcctctgttggatgggccgtgaccgacctgaactacaacatcctgaagttcaacggcaaggccctgtggggcatcagactgttcgattctgccgaaaccgccgctgccagaagaggctttagatctgccaggcggcggatcgacagagtgtcttggagaatctccatgctgcaagagctgttcgccgacgagatcgccaaagtggatgccggcttcttccagcggctgaaggatagcagactgcaggtcgaggacaagcaagagaaaaccgcctacaacctgttcgtgggccagaactacaccgacaaggacttctaccagcagtaccccaccatgtaccacctgagatacgccctggctacacaggccggaccttttgatgtgcggctgctgtatctggccgtgcagcacatcgtgaagcaccggggccactttctgttcgagaacctggacgccagcaaagtgggcgatttcgtggccgtgtttggcgaggtggaaagctacgtgcacgacgagatggaactggacgagtggtactgccacgacatcgatgccctggccaaggtgctgtgcaatgccaatctgggcatcaccgccaagcagaaggccatccagaatctgctgcccgccaagaccaagcaagaaaaggccatcgtgcagctgctgagcggcggaaaggccaagctgtgcgacctgttctgtgacgaggaactggccgaatgcgagaaaaagagcatcagcttccaagaggacaacctcgatgagctggaacccatcctggaagctatcctgcaagagagatacgaggccctgctgcggttcaaggccgtgtatgattggagcctgctggccaagatcctgagactggacgccgacaagaaaagcgagaacgagatgcacctcctgagcgagtgcaaagtgaaggtgtacgaggaacacaagaaagacctggctgtgctgaagtccatgctgaagggcaagcccctgtacaacaagctgttcagacaggacggcgaggacacctacgccaattacgcccagggaatcaaagggatcaaccaggtggacttctgcaagtccctgaagaagcagctggaatctatcggcgagtacaagaaacagatgcagcagctgaccagcttcgaggacgcccagaccgatgtggaaagactgctgtttagagtggccaacggcctggctttccccaagcagaccaccaaggacaacggcatcatcccaatccaggttcacctggccgagctgcagtgtatcctggctcacgccgagaagtacctgcctttcctgaagaacgccgacgccaatggcctgagcgtgcgggaaaagatcacccagatcgtgaagttcagaatcccctactacgtgggacccctggccggcacaagactgtctagagaacagggcagatgctgggtcgagcggagagccgagctgaagaatgagaagatctacccctggaacttcgacaaggtggtggacctggaagcctccgccgagaacttcatcaccaacatgaccgccaagtgcacctacctcgtgggcgaagatgtgctccccaaagagtccctgctgtactccgagttcatggtccgaaacgccctgaacaacctgaccatcgacggcgagagactgcccgtttctctgctgcagaaaatctacaagcagctgttcctggaaaagaccttcaaagtgaccaagaaggccctggaacggttcttcaaacaagagaatgtgtcctaccacgatatcggcggcatcgacgacaagatcaacgcctccatgaaggcctacaacgacttcaagcggatcttcggcgaggcctacatcgaaatgcaccgggatgagatcgagaacatcatccggtggatcaccctgttttgcgacgagaagaagatgctcgagacaaagatccgcaagacgtaccctcagatccccgatgataagatcaaggccattaagaagctgaagtacaaggactggggcagactgagcgccacactgctggattctggcaagatcgcctacgaggatgccagcgtgggcgagagaatcaccatcatctctgccctgcggcacaccaacaagaatttcatggaactgctgagcagcaactgccagtacgacttcatcggcaagattaaggacttcaacggctccaagcagagcgacaatggcaagctgacctacaaggatgtggaagaactgtacgtgtcccctagcgtgaagcggagcatctggcagaccctgaccattctggaagagatcaagaaaatcatgggctgcgagcccaagcgcatcttcatcgagatggccagaagcaaagaggaaagcctgcggaccaacagcaggctgcagagactccaggacctgtacaagaagtgcaaagaagagaacatcgacttcatgcccaaggccgacgagctgaccgacatcagatctcagctccagtgcaagaacgaagaggacctgcggagcgacaagctgtacctgtactacacccagatggggagatgcatgtacaccggcgagaggatcgaactggccagcctgtacgaccagaacaaatacgacgtggacgccatctaccccaggtctaagaccaaggacgacagcctgaacaatcgggtgctcgtgaagaaagagattaacagcgccaagacagacaactaccccatcgacgctgacatccggaagaaaatgcacgccttttggaagatgctgtacgacaagggcttcatcgaccaaaagaagtacgagcggctgaccagaagcacccagctgacagatgaagaactggctggcttcatcaaccggcagctggtggaaaccagacagagcacaaaggccaccgccgacattctgaagtctgcctacgagcacagcgaggtggtgtatgtgaaggccggcaacgtgtccgatttccggcagcagttcgacttcgtgaagtgccgggaagtgaacgacctgcaccacgccaaggacgcctacctgaatatcgtcgtgggcaactgctaccacgtcaagttcaccatcaatccgctgatgttcatccggggcaaccaggacaaccggcggtactctctgaagcccgaggtgttctacgcccacgacattaagcggaacggggagattgcttggctggccggcgataatggcaccatggccacagtgaagagagtgatgcagaaaaacaacgtgctgttcacccggctggcagtcgaagggaaaggcgaattgtttaagcaaaacccattaaaagccaagagcgggcaactgccattgaaagccggcctctccattgacaaatacggcggttacgactcactcagcactgcatacttcgctgtggtcaagtccgagggaaagaaaggtgccgtccaactgagcatagaagctattcctttggtgtacgcgaagcaaggggaaatcgccgttcaaaattatctcaccgaagtggtgcaactctgtaaacccgaaatcatgctgtccaaaattaagaaatacagcttatttaaaatcaacggctttcctatgcatataagcgggcgtaccgataatcgaatcctcttctacggggcgggccagctgtgcattgatgaggctgacgccgactacctgaagaaagcattgaagtacgaggccgacatcgctgaaaatgaactggtgatagccgacacaaacgctgacgatatacaaaagcaaaacgcccaaaagagactcgactactacaaccagaaatggcgaattggtcgcaaaataaacatgcatatatatgacatgctgctggctaaatccggcaattctttatataagaatcgccctgcctcacagacaacggatctgcaagagcagcgcgatgttttcgagaaactgtcattggccgatcaaatacatgtcataggtgaggtcctgaaactgtttaagtgtgccagcgccagcgctaacctgaaacttcttgataaaggaaatgcctgcggagttatcaaggtgtccaacaatatcttgaaattcaagcaatgtatattgattaatcagagccccactggagtatttgagcagaaagttgatttgatgaagctg

SEQ ID NO: 1862 - DNA, 4134 bp, synthetic construct
  source 1..4134: mol_type = other DNA; note = mammalian_codon_optimized_MG71-29-H879A
aagaagaagcaattcggggactactatctgggtctggacatgggcacgtcatctgttgggtgggctgtcacagatctcgattacaacttgctgaaattcaatggcaaagccatgtggggcatcaggctcttcgatgaagctcaaactgctgcagacactcgggtgtttcgctcttcccggcgccggctggaacggaagaagtggcgtataagccttctccaagaactgtttgccgaggagatctctaaggtggaccctggattcttccaacggctcaaggaatctaatcttcaccccgaagataagtcaaataaacagaaatattctttgtttaacgataagaattacacagataaggaatattaccaggagtatcccactatctaccacctgcgcaaggctctgatagaaaacgaaaaggcgttcgatgttagattactgtaccttgcagtgcaacatatccttaaacatagaggtcatttcctctttgaagggctcgacgcttccaatgtaaccgactttgaggacgtcttcaatgaattgcaacaatgcctcaaagataatctcggactcgaggattgggattgcaacaatctggaagaaattgaagaaatcttgaaggacagaaatctcaatatttctgacaagaagaaacagctcgagaagctgctcggtgccgaagataaacaggagaaggccattgtggccctgctctcaggcggaaaggctaagttgtctgatcttttcgcagatgaagagcttaaggaatgtgagaagaactctttcagcttctccgatgacaattatgacgagattgaacccgtactcgaagaggctttaggagaacgtatcgaagtcattgaaaagctgaaggcagtttatgattggtccatcttagctgacatcctgaggctggatgctgataagaaagatgaaggtgaccataactacatcagtgaggctaaagtaaaagtatatgaagagcataagaaagaccttaagatccttaagaaggtcatcaagaaacctgaggagtataagaagattttcaaggatgataaggaagctaattattcctcatacatcggccactgcaaggggaagaaccaagaagacttttgcaaatttctcaagaaagagttgaagaatatcaagagtaaggacaaagccatggcgaaagttacaaccatagaagatgaaaacgcagacgtcgaaaggctgctggaaagaattgctaatgggactgccttccccaagcaagtcacaaaggataatggcgttattccgatgcaagtacaccttgttgagctcaagaagattcttgaaaatgccgaaaagtatctccctttccttaacgaaaccgacgaaaatggactgtcagtcaaagaaaagatcattcagatctttaaatttagaatcccttattacgtcggtccactggctggcacggcaatgagtaaagaaaagggaaggtgttgggtcgttaggaagaatgataagatttacccctggaattttgatgaggtagtcgatctcgaggcttcagcagagaaatttatcagaaagatgacgaacaaatgcacctatttggttggagaggacgtacttccaaagaactcacttttgtattctgaatttatggtgcgaaatgagttaaacaacctgaaaattgatggggagcgtttgtccgttgacctgttgcaaaagatctacgaggatctctttgttcaacccaacggcaaggtcaccaagaagaagctggcagattatcttaagaaagaaaatattgtgagcgatgaaatttccggaattgatgatgagattaagagcagccttaaatcttataaagactttaggcggatatttggcgacgattacgtggaacaacataaagaacaaattgaaaatattatcaaatggattacactcttctcagacgagaagaagatgctcgttaagaaaatcaagaagaattatccagaaattagtgacgagcagataaaacaaattaagaaacttaaatataaagattggggccgactcagcaaaacattgctcaacagcagcgagattgcatatgtggatgaatccactggagagttcatcaccatcatcagcgcgatgagaaagacgaaccttaatttgatggaacttctgtcttctaactgtcaatatgactttgcagaaaagatagaagaatttaataactctaaccaaagtgaagatacggaattgacatatgacactgttgaagatttgtacgtgagccccgctgtgaaaagatcaatatggcaaacgctgaccattgtcaaagaaattaagaagatcatgggtcacgaacctaaaaggattttcattgaaatggctagagaagaagaagaaaagaaacgaaccaaatctcgcaaggataggttactcgaactctataaaagttgcaaagaggaagctgctgagttcgctccaaaggcagacgaagttaatgatctgacttctgagcttgaaagccgggatgagtccgatcttaggagtgataaactttatttgtactatacccaaatgggacgctgcatgtatactggagagccaattgacctggaagagctctataacaataatatgtatgacgtcgatgccatctaccctagatcaaagacgaaggatgatagcctggacaaccttgtgttagtgaagaaagaagtaaatgcagataagtcagataattatcccttaagcagcgccatccaaaagaagatgagggcattctggaaaatgctgctggacaagggtctgatcagccaaaagaagtacgataggctcacacggaagaccccactgaccgatgaagaattggctggctttattagccggcaactggttgaaacccgccagtccaccaaggccgtagcagaaatcttgaaacaagtgtatccggatagtgagattgtgtatgttaaagccggcaatgtttcagactttagacaagagtttgacttcataaaatgtcgggatgtgaacgatctccatcatgcgaaagacgcctatttgaatattgtggtgggcaacgtgtaccataccaaattcaccaataacccattaaatttcattaaggacaaccaaaagaatcaaaggtatacattgaacccgaagaagctctataattacgatattaagagaaatggagaggtggcatggctcgccggagaagacggaaccattgccacggtaaagaaaatgatgaataagaataacattctgtttactcggcacgccgtggagaacaagggccaattattcgatctcaacatactgaaagccggtaaggggcaagttcccataaagaagggccttaatattgagaaatatggtggctacaattccgcaagtaccgcatacttcatgctggtagaaagtgaaaataagaaaggcaagaagatccgcactatcgaagcagtgcctatttacttgatcaagaaagacgaaaacgccttgctggagtatttaaaagagaaatgtggtttgaagaatcctaagattatcattcctaagatcaaaattaattccttgcttgagattgatggctttccaatgcatatctccggcaaaactggagagcaactcatctttaagaacgccacacaactgtgcctggatgaagaacacgaaaagtatctcaagaaggttgtgaagtatattgagaggcataaagaaaacaatgatgtcgctgctgacaagaattgggatgagatcgtaaagcagaaataccaacttaagctgacactgtatgataatacatggggtattaccaaggagaagaatctggagttgtacgatatgttgttagagaagcataagaacaatgtatacaagaatcgacctgcttcccaagtgaagacgttaaaggatggccgcgagaaattcgtcaagctgagtttagaggaacagtgcttggttctgtctgaaatccttaacctgtttcaatgtaaatctgtcacggccaacttaaaattaattggtgggagcaagaatgctggcaccattaaagtgtctaagaatatcactaaccgcgatcaagtgtatttaattaaccaatccgttaccggcttattcgaacagaaagtggaccttttgaagatt

SEQ ID NO: 1863 - RNA, 102 nt, synthetic construct
  source 1..102: mol_type = other RNA; note = MG71-2 AAVS1 sgRNA A1
  modified_base 1..3: mod_base = OTHER; note = 2'O-methyl ribonucleotide
  modified_base 1..4: mod_base = OTHER; note = phosphorothioate linkage
  modified_base 100..102: mod_base = OTHER; note = 2'O-methyl ribonucleotide
  modified_base 99..102: mod_base = OTHER; note = phosphorothioate linkage
aacttattctgattttgtttttgtttgagagtgagaaatcacgagttcaaaaaacatgatttattcaaaccgtcttcttcggaaggccccacagtgtgtggt

SEQ ID NO: 1864 - RNA, 102 nt, synthetic construct
  source 1..102: mol_type = other RNA; note = MG71-2 AAVS1 sgRNA B1
  modified_base 1..3: mod_base = OTHER; note = 2'O-methyl ribonucleotide
  modified_base 1..4: mod_base = OTHER; note = phosphorothioate linkage
  modified_base 100..102: mod_base = OTHER; note = 2'O-methyl ribonucleotide
  modified_base 99..102: mod_base = OTHER; note = phosphorothioate linkage
acttattctgattttgtttttcgtttgagagtgagaaatcacgagttcaaaaaacatgatttattcaaaccgtcttcttcggaaggccccacagtgtgtggt

SEQ ID NO: 1865 - RNA, 102 nt, synthetic construct
  source 1..102: mol_type = other RNA; note = MG71-2 AAVS1 sgRNA C1
  modified_base 1..3: mod_base = OTHER; note = 2'O-methyl ribonucleotide
  modified_base 1..4: mod_base = OTHER; note = phosphorothioate linkage
  modified_base 100..102: mod_base = OTHER; note = 2'O-methyl ribonucleotide
  modified_base 99..102: mod_base = OTHER; note = phosphorothioate linkage
tattctgattttgtttttccaagtttgagagtgagaaatcacgagttcaaaaaacatgatttattcaaaccgtcttcttcggaaggccccacagtgtgtggt

SEQ ID NO: 1866 - RNA, 102 nt, synthetic construct
  source 1..102: mol_type = other RNA; note = MG71-2 AAVS1 sgRNA D1
  modified_base 1..3: mod_base = OTHER; note = 2'O-methyl ribonucleotide
  modified_base 1..4: mod_base = OTHER; note = phosphorothioate linkage
  modified_base 100..102: mod_base = OTHER; note = 2'O-methyl ribonucleotide
  modified_base 99..102: mod_base = OTHER; note = phosphorothioate linkage
ttctcctcttgggaagtgtaaggtttgagagtgagaaatcacgagttcaaaaaacatgatttattcaaaccgtcttcttcggaaggccccacagtgtgtggt

SEQ ID NO: 1867 - RNA, 102 nt, synthetic construct
  source 1..102: mol_type = other RNA; note = MG71-2 AAVS1 sgRNA E1
  modified_base 1..3: mod_base = OTHER; note = 2'O-methyl ribonucleotide
  modified_base 1..4: mod_base = OTHER; note = phosphorothioate linkage
  modified_base 100..102: mod_base = OTHER; note = 2'O-methyl ribonucleotide
  modified_base 99..102: mod_base = OTHER; note = phosphorothioate linkage
ttgggaagtgtaaggaagctgcgtttgagagtgagaaatcacgagttcaaaaaacatgatttattcaaaccgtcttcttcggaaggccccacagtgtgtggt

SEQ ID NO: 1868 - RNA, 102 nt, synthetic construct
  source 1..102: mol_type = other RNA; note = MG71-2 AAVS1 sgRNA F1
  modified_base 1..3: mod_base = OTHER; note = 2'O-methyl ribonucleotide
  modified_base 1..4: mod_base = OTHER; note = phosphorothioate linkage
  modified_base 100..102: mod_base = OTHER; note = 2'O-methyl ribonucleotide
  modified_base 99..102: mod_base = OTHER; note = phosphorothioate linkage
aagtgtaaggaagctgcagcacgtttgagagtgagaaatcacgagttcaaaaaacatgatttattcaaaccgtcttcttcggaaggccccacagtgtgtggt

SEQ ID NO: 1869 - RNA, 102 nt, synthetic construct
  source 1..102: mol_type = other RNA; note = MG71-2 AAVS1 sgRNA G1
  modified_base 1..3: mod_base = OTHER; note = 2'O-methyl ribonucleotide
  modified_base 1..4: mod_base = OTHER; note = phosphorothioate linkage
  modified_base 100..102: mod_base = OTHER; note = 2'O-methyl ribonucleotide
  modified_base 99..102: mod_base = OTHER; note = phosphorothioate linkage
gaagctgcagcaccaggatcaggtttgagagtgagaaatcacgagttcaaaaaacatgatttattcaaaccgtcttcttcggaaggccccacagtgtgtggt

SEQ ID NO: 1870 - RNA, 102 nt, synthetic construct
  source 1..102: mol_type = other RNA; note = MG71-2 AAVS1 sgRNA H1
  modified_base 1..3: mod_base = OTHER; note = 2'O-methyl ribonucleotide
  modified_base 1..4: mod_base = OTHER; note = phosphorothioate linkage
  modified_base 100..102: mod_base = OTHER; note = 2'O-methyl ribonucleotide
  modified_base 99..102: mod_base = OTHER; note = phosphorothioate linkage
tgcagcaccaggatcagtgaaagtttgagagtgagaaatcacgagttcaaaaaacatgatttattcaaaccgtcttcttcggaaggccccacagtgtgtggt

SEQ ID NO: 1871 - RNA, 102 nt, synthetic construct
  source 1..102: mol_type = other RNA; note = MG71-2 AAVS1 sgRNA A2
  modified_base 1..3: mod_base = OTHER; note = 2'O-methyl ribonucleotide
  modified_base 1..4: mod_base = OTHER; note = phosphorothioate linkage
  modified_base 100..102: mod_base = OTHER; note = 2'O-methyl ribonucleotide
  modified_base 99..102: mod_base = OTHER; note = phosphorothioate linkage
gcaccaggatcagtgaaacgcagtttgagagtgagaaatcacgagttcaaaaaacatgatttattcaaaccgtcttcttcggaaggccccacagtgtgtggt

SEQ ID NO: 1872 - RNA, 102 nt, synthetic construct
  source 1..102: mol_type = other RNA; note = MG71-2 AAVS1 sgRNA B2
  modified_base 1..3: mod_base = OTHER; note = 2'O-methyl ribonucleotide
  modified_base 1..4: mod_base = OTHER; note = phosphorothioate linkage
  modified_base 100..102: mod_base = OTHER; note = 2'O-methyl ribonucleotide
  modified_base 99..102: mod_base = OTHER; note = phosphorothioate linkage
caggatcagtgaaacgcaccaggtttgagagtgagaaatcacgagttcaaaaaacatgatttattcaaaccgtcttcttcggaaggccccacagtgtgtggt

SEQ ID NO: 1873 - RNA, 102 nt, synthetic construct
  source 1..102: mol_type = other RNA; note = MG71-2 AAVS1 sgRNA C2
  modified_base 1..3: mod_base = OTHER; note = 2'O-methyl ribonucleotide
  modified_base 1..4: mod_base = OTHER; note = phosphorothioate linkage
  modified_base 100..102: mod_base = OTHER; note = 2'O-methyl ribonucleotide
  modified_base 99..102: mod_base = OTHER; note = phosphorothioate linkage
cgcaccagacggccgcgtcagagtttgagagtgagaaatcacgagttcaaaaaacatgatttattcaaaccgtcttcttcggaaggccccacagtgtgtggt

SEQ ID NO: 1874 - RNA, 102 nt, synthetic construct
  source 1..102: mol_type = other RNA; note = MG71-2 AAVS1 sgRNA D2
  modified_base 1..3: mod_base = OTHER; note = 2'O-methyl ribonucleotide
  modified_base 1..4: mod_base = OTHER; note = phosphorothioate linkage
  modified_base 100..102: mod_base = OTHER; note = 2'O-methyl ribonucleotide
  modified_base 99..102: mod_base = OTHER; note = phosphorothioate linkage
ttctgggagagggtagcgcagggtttgagagtgagaaatcacgagttcaaaaaacatgatttattcaaaccgtcttcttcggaaggccccacagtgtgtggt

SEQ ID NO: 1875 - RNA, 102 nt, synthetic construct
  source 1..102: mol_type = other RNA; note = MG71-2 AAVS1 sgRNA E2
  modified_base 1..3: mod_base = OTHER; note = 2'O-methyl ribonucleotide
  modified_base 1..4: mod_base = OTHER; note = phosphorothioate linkage
  modified_base 100..102: mod_base = OTHER; note = 2'O-methyl ribonucleotide
  modified_base 99..102: mod_base = OTHER; note = phosphorothioate linkage
tgggagagggtagcgcagggtggtttgagagtgagaaatcacgagttcaaaaaacatgatttattcaaaccgtcttcttcggaaggccccacagtgtgtggt

SEQ ID NO: 1876 - RNA, 102 nt, synthetic construct
  source 1..102: mol_type = other RNA; note = MG71-2 AAVS1 sgRNA F2
  modified_base 1..3: mod_base = OTHER; note = 2'O-methyl ribonucleotide
  modified_base 1..4: mod_base = OTHER; note = phosphorothioate linkage
  modified_base 100..102: mod_base = OTHER; note = 2'O-methyl ribonucleotide
  modified_base 99..102: mod_base = OTHER; note = phosphorothioate linkage
agggtagcgcagggtggccactgtttgagagtgagaaatcacgagttcaaaaaacatgatttattcaaaccgtcttcttcggaaggccccacagtgtgtggt

SEQ ID NO: 1877 - RNA, 102 nt, synthetic construct
  source 1..102: mol_type = other RNA; note = MG71-2 AAVS1 sgRNA G2
  modified_base 1..3: mod_base = OTHER; note = 2'O-methyl ribonucleotide
  modified_base 1..4: mod_base = OTHER; note = phosphorothioate linkage
  modified_base 100..102: mod_base = OTHER; note = 2'O-methyl ribonucleotide
  modified_base 99..102: mod_base = OTHER; note = phosphorothioate linkage
gggtagcgcagggtggccactggtttgagagtgagaaatcacgagttcaaaaaacatgatttattcaaaccgtcttcttcggaaggccccacagtgtgtggt

SEQ ID NO: 1878 - RNA, 102 nt, synthetic construct
  source 1..102: mol_type = other RNA; note = MG71-2 AAVS1 sgRNA H2
  modified_base 1..3: mod_base = OTHER; note = 2'O-methyl ribonucleotide
  modified_base 1..4: mod_base = OTHER; note = phosphorothioate linkage
  modified_base 100..102: mod_base = OTHER; note = 2'O-methyl ribonucleotide
  modified_base 99..102: mod_base = OTHER; note = phosphorothioate linkage
ccccttccctcccaccccctgcgtttgagagtgagaaatcacgagttcaaaaaacatgatttattcaaaccgtcttcttcggaaggccccacagtgtgtggt

SEQ ID NO: 1879 - RNA, 102 nt, synthetic construct
  source 1..102: mol_type = other RNA; note = MG71-2 AAVS1 sgRNA A3
  modified_base 1..3: mod_base = OTHER; note = 2'O-methyl ribonucleotide
  modified_base 1..4: mod_base = OTHER; note = phosphorothioate linkage
  modified_base 100..102: mod_base = OTHER; note = 2'O-methyl ribonucleotide
  modified_base 99..102: mod_base = OTHER; note = phosphorothioate linkage
ccccctgccaagctctccctccgtttgagagtgagaaatcacgagttcaaaaaacatgatttattcaaaccgtcttcttcggaaggccccacagtgtgtggt

SEQ ID NO: 1880 - RNA, 102 nt, synthetic construct
  source 1..102: mol_type = other RNA; note = MG71-2 AAVS1 sgRNA B3
  modified_base 1..3: mod_base = OTHER; note = 2'O-methyl ribonucleotide
  modified_base 1..4: mod_base = OTHER; note = phosphorothioate linkage
  modified_base 100..102: mod_base = OTHER; note = 2'O-methyl ribonucleotide
  modified_base 99..102: mod_base = OTHER; note = phosphorothioate linkage
gctctccctcccaggatcctctgtttgagagtgagaaatcacgagttcaaaaaacatgatttattcaaaccgtcttcttcggaaggccccacagtgtgtggt

SEQ ID NO: 1881 - RNA, 102 nt, synthetic construct
  source 1..102: mol_type = other RNA; note = MG71-2 AAVS1 sgRNA C3
  modified_base 1..3: mod_base = OTHER; note = 2'O-methyl ribonucleotide
  modified_base 1..4: mod_base = OTHER; note = phosphorothioate linkage
  modified_base 100..102: mod_base = OTHER; note = 2'O-methyl ribonucleotide
  modified_base 99..102: mod_base = OTHER; note = phosphorothioate linkage
atcctctctggctccatcgtaagtttgagagtgagaaatcacgagttcaaaaaacatgatttattcaaaccgtcttcttcggaaggccccacagtgtgtggt

SEQ ID NO: 1882 - RNA, 102 nt, synthetic construct
  source 1..102: mol_type = other RNA; note = MG71-2 AAVS1 sgRNA D3
  modified_base 1..3: mod_base = OTHER; note = 2'O-methyl ribonucleotide
  modified_base 1..4: mod_base = OTHER; note = phosphorothioate linkage
  modified_base 100..102: mod_base = OTHER; note = 2'O-methyl ribonucleotide
  modified_base 99..102: mod_base = OTHER; note = phosphorothioate linkage
tcctctctggctccatcgtaaggtttgagagtgagaaatcacgagttcaaaaaacatgatttattcaaaccgtcttcttcggaaggccccacagtgtgtggt

SEQ ID NO: 1883 - RNA, 102 nt, synthetic construct
  source 1..102: mol_type = other RNA; note = MG71-2 AAVS1 sgRNA E3
  modified_base 1..3: mod_base = OTHER; note = 2'O-methyl ribonucleotide
  modified_base 1..4: mod_base = OTHER; note = phosphorothioate linkage
  modified_base 100..102: mod_base = OTHER; note = 2'O-methyl ribonucleotide
  modified_base 99..102: mod_base = OTHER; note = phosphorothioate linkage
ccttagaggttctggcaaggaggtttgagagtgagaaatcacgagttcaaaaaacatgatttattcaaaccgtcttcttcggaaggccccacagtgtgtggt

SEQ ID NO: 1884 - RNA, 102 nt, synthetic construct
  source 1..102: mol_type = other RNA; note = MG71-2 AAVS1 sgRNA F3
  modified_base 1..3: mod_base = OTHER; note = 2'O-methyl ribonucleotide
  modified_base 1..4: mod_base = OTHER; note = phosphorothioate linkage
  modified_base 100..102: mod_base = OTHER; note = 2'O-methyl ribonucleotide
  modified_base 99..102: mod_base = OTHER; note = phosphorothioate linkage
agaggttctggcaaggagagaggtttgagagtgagaaatcacgagttcaaaaaacatgatttattcaaaccgtcttcttcggaaggccccacagtgtgtggt

SEQ ID NO: 1885 - RNA, 102 nt, synthetic construct
  source 1..102: mol_type = other RNA; note = MG71-2 AAVS1 sgRNA G3
  modified_base 1..3: mod_base = OTHER; note = 2'O-methyl ribonucleotide
  modified_base 1..4: mod_base = OTHER; note = phosphorothioate linkage
  modified_base 100..102: mod_base = OTHER; note = 2'O-methyl ribonucleotide
  modified_base 99..102: mod_base = OTHER; note = phosphorothioate linkage
atttcctggagccatctctctcgtttgagagtgagaaatcacgagttcaaaaaacatgatttattcaaaccgtcttcttcggaaggccccacagtgtgtggt

SEQ ID NO: 1886 - RNA, 102 nt, synthetic construct
  source 1..102: mol_type = other RNA; note = MG71-2 AAVS1 sgRNA H3
  modified_base 1..3: mod_base = OTHER; note = 2'O-methyl ribonucleotide
  modified_base 1..4: mod_base = OTHER; note = phosphorothioate linkage
  modified_base 100..102: mod_base = OTHER; note = 2'O-methyl ribonucleotide
  modified_base 99..102: mod_base = OTHER; note = phosphorothioate linkage
ctggagccatctctctccttgcgtttgagagtgagaaatcacgagttcaaaaaacatgatttattcaaaccgtcttcttcggaaggccccacagtgtgtggt

SEQ ID NO: 1887 - RNA, 102 nt, synthetic construct
  source 1..102: mol_type = other RNA; note = MG71-2 AAVS1 sgRNA A4
  modified_base 1..3: mod_base = OTHER; note = 2'O-methyl ribonucleotide
  modified_base 1..4: mod_base = OTHER; note = phosphorothioate linkage
  modified_base 100..102: mod_base = OTHER; note = 2'O-methyl ribonucleotide
  modified_base 99..102: mod_base = OTHER; note = phosphorothioate linkage
tggagccatctctctccttgccgtttgagagtgagaaatcacgagttcaaaaaacatgatttattcaaaccgtcttcttcggaaggccccacagtgtgtggt

SEQ ID NO: 1888 - RNA, 102 nt, synthetic construct
  source 1..102: mol_type = other RNA; note = MG71-2 AAVS1 sgRNA B4
  modified_base 1..3: mod_base = OTHER; note = 2'O-methyl ribonucleotide
  modified_base 1..4: mod_base = OTHER; note = phosphorothioate linkage
  modified_base 100..102: mod_base = OTHER; note = 2'O-methyl ribonucleotide
  modified_base 99..102: mod_base = OTHER; note = phosphorothioate linkage
ctccttgccagaacctctaagggtttgagagtgagaaatcacgagttcaaaaaacatgatttattcaaaccgtcttcttcggaaggccccacagtgtgtggt

SEQ ID NO: 1889 - RNA, 102 nt, synthetic construct
  source 1..102: mol_type = other RNA; note = MG71-2 AAVS1 sgRNA C4
  modified_base 1..3: mod_base = OTHER; note = 2'O-methyl ribonucleotide
  modified_base 1..4: mod_base = OTHER; note = phosphorothioate linkage
  modified_base 100..102: mod_base = OTHER; note = 2'O-methyl ribonucleotide
  modified_base 99..102: mod_base = OTHER; note = phosphorothioate linkage
gccagaacctctaaggtttgctgtttgagagtgagaaatcacgagttcaaaaaacatgatttattcaaaccgtcttcttcggaaggccccacagtgtgtggt

SEQ ID NO: 1890 - RNA, 102 nt, synthetic construct
  source 1..102: mol_type = other RNA; note = MG71-2 AAVS1 sgRNA D4
  modified_base 1..3: mod_base = OTHER; note = 2'O-methyl ribonucleotide
  modified_base 1..4: mod_base = OTHER; note = phosphorothioate linkage
  modified_base 100..102: mod_base = OTHER; note = 2'O-methyl ribonucleotide
  modified_base 99..102: mod_base = OTHER; note = phosphorothioate linkage
acctctaaggtttgcttacgatgtttgagagtgagaaatcacgagttcaaaaaacatgatttattcaaaccgtcttcttcggaaggccccacagtgtgtggt

SEQ ID NO: 1891 - RNA, 102 nt, synthetic construct
  source 1..102: mol_type = other RNA; note = MG71-2 AAVS1 sgRNA E4
  modified_base 1..3: mod_base = OTHER; note = 2'O-methyl ribonucleotide
  modified_base 1..4: mod_base = OTHER; note = phosphorothioate linkage
  modified_base 100..102: mod_base = OTHER; note = 2'O-methyl ribonucleotide
  modified_base 99..102: mod_base = OTHER; note = phosphorothioate linkage
gtttgcttacgatggagccagagtttgagagtgagaaatcacgagttcaaaaaacatgatttattcaaaccgtcttcttcggaaggccccacagtgtgtggt

SEQ ID NO: 1892 - RNA, 102 nt, synthetic construct
  source 1..102: mol_type = other RNA; note = MG71-2 AAVS1 sgRNA F4
  modified_base 1..3: mod_base = OTHER; note = 2'O-methyl ribonucleotide
  modified_base 1..4: mod_base = OTHER; note = phosphorothioate linkage
  modified_base 100..102: mod_base = OTHER; note = 2'O-methyl ribonucleotide
  modified_base 99..102: mod_base = OTHER; note = phosphorothioate linkage
gccagagaggatcctgggaggggtttgagagtgagaaatcacgagttcaaaaaacatgatttattcaaaccgtcttcttcggaaggccccacagtgtgtggt

SEQ ID NO: 1893 - RNA, 102 nt, synthetic construct
  source 1..102: mol_type = other RNA; note = MG71-2 AAVS1 sgRNA G4
  modified_base 1..3: mod_base = OTHER; note = 2'O-methyl ribonucleotide
  modified_base 1..4: mod_base = OTHER; note = phosphorothioate linkage
  modified_base 100..102: mod_base = OTHER; note = 2'O-methyl ribonucleotide
  modified_base 99..102: mod_base = OTHER; note = phosphorothioate linkage
tgcgtgacctgcccggttctcagtttgagagtgagaaatcacgagttcaaaaaacatgatttattcaaaccgtcttcttcggaaggccccacagtgtgtggt

SEQ ID NO: 1894 - RNA, 102 nt, synthetic construct
  source 1..102: mol_type = other RNA; note = MG71-2 AAVS1 sgRNA H4
  modified_base 1..3: mod_base = OTHER; note = 2'O-methyl ribonucleotide
  modified_base 1..4: mod_base = OTHER; note = phosphorothioate linkage
  modified_base 100..102: mod_base = OTHER; note = 2'O-methyl ribonucleotide
  modified_base 99..102: mod_base = OTHER; note = phosphorothioate linkage
gtgacctgcccggttctcagtggtttgagagtgagaaatcacgagttcaaaaaacatgatttattcaaaccgtcttcttcggaaggccccacagtgtgtggt

SEQ ID NO: 1895 - RNA, 102 nt, synthetic construct
  source 1..102: mol_type = other RNA; note = MG71-2 AAVS1 sgRNA A5
  modified_base 1..3: mod_base = OTHER; note = 2'O-methyl ribonucleotide
  modified_base 1..4: mod_base = OTHER; note = phosphorothioate linkage
  modified_base 100..102: mod_base = OTHER; note = 2'O-methyl ribonucleotide
  modified_base 99..102: mod_base = OTHER; note = phosphorothioate linkage
gcccggttctcagtggccacccgtttgagagtgagaaatcacgagttcaaaaaacatgatttattcaaaccgtcttcttcggaaggccccacagtgtgtggt

SEQ ID NO: 1896 - RNA, 102 nt, synthetic construct
  source 1..102: mol_type = other RNA; note = MG71-2 AAVS1 sgRNA B5
  modified_base 1..3: mod_base = OTHER; note = 2'O-methyl ribonucleotide
  modified_base 1..4: mod_base = OTHER; note = phosphorothioate linkage
  modified_base 100..102: mod_base = OTHER; note = 2'O-methyl ribonucleotide
  modified_base 99..102: mod_base = OTHER; note = phosphorothioate linkage
cggttctcagtggccaccctgcgtttgagagtgagaaatcacgagttcaaaaaacatgatttattcaaaccgtcttcttcggaaggccccacagtgtgtggt

SEQ ID NO: 1897 - RNA, 102 nt, synthetic construct
  source 1..102: mol_type = other RNA; note = MG71-2 AAVS1 sgRNA C5
  modified_base 1..3: mod_base = OTHER; note = 2'O-methyl ribonucleotide
  modified_base 1..4: mod_base = OTHER; note = phosphorothioate linkage
  modified_base 100..102: mod_base = OTHER; note = 2'O-methyl ribonucleotide
  modified_base 99..102: mod_base = OTHER; note = phosphorothioate linkage
gccaccctgcgctaccctctccgtttgagagtgagaaatcacgagttcaaaaaacatgatttattcaaaccgtcttcttcggaaggccccacagtgtgtggt

SEQ ID NO: 1898 - RNA, 102 nt, synthetic construct
  source 1..102: mol_type = other RNA; note = MG71-2 AAVS1 sgRNA D5
  modified_base 1..3: mod_base = OTHER; note = 2'O-methyl ribonucleotide
  modified_base 1..4: mod_base = OTHER; note = phosphorothioate linkage
  modified_base 100..102: mod_base = OTHER; note = 2'O-methyl ribonucleotide
  modified_base 99..102: mod_base = OTHER; note = phosphorothioate linkage
ccaccctgcgctaccctctcccgtttgagagtgagaaatcacgagttcaaaaaacatgatttattcaaaccgtcttcttcggaaggccccacagtgtgtggt

SEQ ID NO: 1899 - RNA, 102 nt, synthetic construct
  source 1..102: mol_type = other RNA; note = MG71-2 AAVS1 sgRNA E5
  modified_base 1..3: mod_base = OTHER; note = 2'O-methyl ribonucleotide
  modified_base 1..4: mod_base = OTHER; note = phosphorothioate linkage
  modified_base 100..102: mod_base = OTHER; note = 2'O-methyl ribonucleotide
  modified_base 99..102: mod_base = OTHER; note = phosphorothioate linkage
tgcgctaccctctcccagaaccgtttgagagtgagaaatcacgagttcaaaaaacatgatttattcaaaccgtcttcttcggaaggccccacagtgtgtggt

SEQ ID NO: 1900 - RNA, 102 nt, synthetic construct
  source 1..102: mol_type = other RNA; note = MG71-2 AAVS1 sgRNA F5
  modified_base 1..3: mod_base = OTHER; note = 2'O-methyl ribonucleotide
  modified_base 1..4: mod_base = OTHER; note = phosphorothioate linkage
  modified_base 100..102: mod_base = OTHER; note = 2'O-methyl ribonucleotide
  modified_base 99..102: mod_base = OTHER; note = phosphorothioate linkage
gctaccctctcccagaacctgagtttgagagtgagaaatcacgagttcaaaaaacatgatttattcaaaccgtcttcttcggaaggccccacagtgtgtggt

SEQ ID NO: 1901 - RNA, 102 nt, synthetic construct
  source 1..102: mol_type = other RNA; note = MG71-2 AAVS1 sgRNA G5
  modified_base 1..3: mod_base = OTHER; note = 2'O-methyl ribonucleotide
  modified_base 1..4: mod_base = OTHER; note = phosphorothioate linkage
  modified_base 100..102: mod_base = OTHER; note = 2'O-methyl ribonucleotide
  modified_base 99..102: mod_base = OTHER; note = phosphorothioate linkage
cctctcccagaacctgagctgcgtttgagagtgagaaatcacgagttcaaaaaacatgatttattcaaaccgtcttcttcggaaggccccacagtgtgtggt

SEQ ID NO: 1902 - RNA, 102 nt, synthetic construct
  source 1..102: mol_type = other RNA; note = MG71-2 AAVS1 sgRNA H5
  modified_base 1..3: mod_base = OTHER; note = 2'O-methyl ribonucleotide
  modified_base 1..4: mod_base = OTHER; note = phosphorothioate linkage
  modified_base 100..102: mod_base = OTHER; note = 2'O-methyl ribonucleotide
  modified_base 99..102: mod_base = OTHER; note = phosphorothioate linkage
ccagaacctgagctgctctgacgtttgagagtgagaaatcacgagttcaaaaaacatgatttattcaaaccgtcttcttcggaaggccccacagtgtgtggt

SEQ ID NO: 1903 - RNA, 102 nt, synthetic construct
  source 1..102: mol_type = other RNA; note = MG71-2 AAVS1 sgRNA A6
  modified_base 1..3: mod_base = OTHER; note = 2'O-methyl ribonucleotide
  modified_base 1..4: mod_base = OTHER; note = phosphorothioate linkage
  modified_base 100..102: mod_base = OTHER; note = 2'O-methyl ribonucleotide
  modified_base 99..102: mod_base = OTHER; note = phosphorothioate linkage
ctgacgcggccgtctggtgcgtgtttgagagtgagaaatcacgagttcaaaaaacatgatttattcaaaccgtcttcttcggaaggccccacagtgtgtggt

SEQ ID NO: 1904 - RNA, 102 nt, synthetic construct
  source 1..102: mol_type = other RNA; note = MG71-2 AAVS1 sgRNA B6
  modified_base 1..3: mod_base = OTHER; note = 2'O-methyl ribonucleotide
  modified_base 1..4: mod_base = OTHER; note = phosphorothioate linkage
  modified_base 100..102: mod_base = OTHER; note = 2'O-methyl ribonucleotide
  modified_base 99..102: mod_base = OTHER; note = phosphorothioate linkage
acgcggccgtctggtgcgtttcgtttgagagtgagaaatcacgagttcaaaaaacatgatttattcaaaccgtcttcttcggaaggccccacagtgtgtggt

SEQ ID NO: 1905 - RNA, 102 nt, synthetic construct
  source 1..102: mol_type = other RNA; note = MG71-2 AAVS1 sgRNA C6
  modified_base 1..3: mod_base = OTHER; note = 2'O-methyl ribonucleotide
  modified_base 1..4: mod_base = OTHER; note = phosphorothioate linkage
  modified_base 100..102: mod_base = OTHER; note = 2'O-methyl ribonucleotide
  modified_base 99..102: mod_base = OTHER; note = phosphorothioate linkage
tctggtgcgtttcactgatcctgtttgagagtgagaaatcacgagttcaaaaaacatgatttattcaaaccgtcttcttcggaaggccccacagtgtgtggt

SEQ ID NO: 1906 - RNA, 102 nt, synthetic construct
  source 1..102: mol_type = other RNA; note = MG71-2 AAVS1 sgRNA D6
  modified_base 1..3: mod_base = OTHER; note = 2'O-methyl ribonucleotide
  modified_base 1..4: mod_base = OTHER; note = phosphorothioate linkage
  modified_base 100..102: mod_base = OTHER; note = 2'O-methyl ribonucleotide
  modified_base 99..102: mod_base = OTHER; note = phosphorothioate linkage
gcgtttcactgatcctggtgctgtttgagagtgagaaatcacgagttcaaaaaacatgatttattcaaaccgtcttcttcggaaggccccacagtgtgtggt

SEQ ID NO: 1907 - RNA, 102 nt, synthetic construct
  source 1..102: mol_type = other RNA; note = MG71-2 AAVS1 sgRNA E6
  modified_base 1..3: mod_base = OTHER; note = 2'O-methyl ribonucleotide
  modified_base 1..4: mod_base = OTHER; note = phosphorothioate linkage
  modified_base 100..102: mod_base = OTHER; note = 2'O-methyl ribonucleotide
  modified_base 99..102: mod_base = OTHER; note = phosphorothioate linkage
gatcctggtgctgcagcttcctgtttgagagtgagaaatcacgagttcaaaaaacatgatttattcaaaccgtcttcttcggaaggccccacagtgtgtggt

SEQ ID NO: 1908 - RNA, 102 nt, synthetic construct
  source 1..102: mol_type = other RNA; note = MG71-2 AAVS1 sgRNA F6
  modified_base 1..3: mod_base = OTHER; note = 2'O-methyl ribonucleotide
  modified_base 1..4: mod_base = OTHER; note = phosphorothioate linkage
  modified_base 100..102: mod_base = OTHER; note = 2'O-methyl ribonucleotide
  modified_base 99..102: mod_base = OTHER; note = phosphorothioate linkage
cccaagaggagaagcagtttgggtttgagagtgagaaatcacgagttcaaaaaacatgatttattcaaaccgtcttcttcggaaggccccacagtgtgtggt

SEQ ID NO: 1909 - RNA, 102 nt, synthetic construct
  source 1..102: mol_type = other RNA; note = MG71-2 AAVS1 sgRNA G6
  modified_base 1..3: mod_base = OTHER; note = 2'O-methyl ribonucleotide
  modified_base 1..4: mod_base = OTHER; note = phosphorothioate linkage
  modified_base 100..102: mod_base = OTHER; note = 2'O-methyl ribonucleotide
  modified_base 99..102: mod_base = OTHER; note = phosphorothioate linkage
gaggagaagcagtttggaaaaagtttgagagtgagaaatcacgagttcaaaaaacatgatttattcaaaccgtcttcttcggaaggccccacagtgtgtggt

SEQ ID NO: 1910 - RNA, 102 nt, synthetic construct
  source 1..102: mol_type = other RNA; note = MG71-2 AAVS1 sgRNA H6
  modified_base 1..3: mod_base = OTHER; note = 2'O-methyl ribonucleotide
  modified_base 1..4: mod_base = OTHER; note = phosphorothioate linkage
  modified_base 100..102: mod_base = OTHER; note = 2'O-methyl ribonucleotide
  modified_base 99..102: mod_base = OTHER; note = phosphorothioate linkage
aagcagtttggaaaaacaaaatgtttgagagtgagaaatcacgagttcaaaaaacatgatttattcaaaccgtcttcttcggaaggccccacagtgtgtggt

SEQ ID NO: 1911 - DNA, 22 bp, Homo sapiens
  source 1..22: mol_type = genomic DNA; note = MG71-2 AAVS1 Target Site A1
aacttattctgattttgttttt

SEQ ID NO: 1912 - DNA, 22 bp, Homo sapiens
  source 1..22: mol_type = genomic DNA; note = MG71-2 AAVS1 Target Site B1
acttattctgattttgtttttc

SEQ ID NO: 1913 - DNA, 22 bp, Homo sapiens
  source 1..22: mol_type = genomic DNA; note = MG71-2 AAVS1 Target Site C1
tattctgattttgtttttccaa

SEQ ID NO: 1914 - DNA, 22 bp, Homo sapiens
  source 1..22: mol_type = genomic DNA; note = MG71-2 AAVS1 Target Site D1
ttctcctcttgggaagtgtaag

SEQ ID NO: 1915 - DNA, 22 bp, Homo sapiens
  source 1..22: mol_type = genomic DNA; note = MG71-2 AAVS1 Target Site E1
ttgggaagtgtaaggaagctgc

SEQ ID NO: 1916 - DNA, 22 bp, Homo sapiens
  source 1..22: mol_type = genomic DNA; note = MG71-2 AAVS1 Target Site F1
aagtgtaaggaagctgcagcac

SEQ ID NO: 1917 - DNA, 22 bp, Homo sapiens
  source 1..22: mol_type = genomic DNA; note = MG71-2 AAVS1 Target Site G1
gaagctgcagcaccaggatcag

SEQ ID NO: 1918 - DNA, 22 bp, Homo sapiens
  source 1..22: mol_type = genomic DNA; note = MG71-2 AAVS1 Target Site H1
tgcagcaccaggatcagtgaaa

SEQ ID NO: 1919 - DNA, 22 bp, Homo sapiens
  source 1..22: mol_type = genomic DNA; note = MG71-2 AAVS1 Target Site A2
gcaccaggatcagtgaaacgca

SEQ ID NO: 1920 - DNA, 22 bp, Homo sapiens
  source 1..22: mol_type = genomic DNA; note = MG71-2 AAVS1 Target Site B2
caggatcagtgaaacgcaccag

SEQ ID NO: 1921 - DNA, 22 bp, Homo sapiens
  source 1..22: mol_type = genomic DNA; note = MG71-2 AAVS1 Target Site C2
cgcaccagacggccgcgtcaga

SEQ ID NO: 1922 - DNA, 22 bp, Homo sapiens
  source 1..22: mol_type = genomic DNA; note = MG71-2 AAVS1 Target Site D2
ttctgggagagggtagcgcagg

SEQ ID NO: 1923 - DNA, 22 bp, Homo sapiens
  source 1..22: mol_type = genomic DNA; note = MG71-2 AAVS1 Target Site E2
tgggagagggtagcgcagggtg

SEQ ID NO: 1924 - DNA, 22 bp, Homo sapiens
  source 1..22: mol_type = genomic DNA; note = MG71-2 AAVS1 Target Site F2
agggtagcgcagggtggccact

SEQ ID NO: 1925 - DNA, 22 bp, Homo sapiens
  source 1..22: mol_type = genomic DNA; note = MG71-2 AAVS1 Target Site G2
gggtagcgcagggtggccactg

SEQ ID NO: 1926 - DNA, 22 bp, Homo sapiens
  source 1..22: mol_type = genomic DNA; note = MG71-2 AAVS1 Target Site H2
ccccttccctcccaccccctgc

SEQ ID NO: 1927 - DNA, 22 bp, Homo sapiens
  source 1..22: mol_type = genomic DNA; note = MG71-2 AAVS1 Target Site A3
ccccctgccaagctctccctcc

SEQ ID NO: 1928 - DNA, 22 bp, Homo sapiens
  source 1..22: mol_type = genomic DNA; note = MG71-2 AAVS1 Target Site B3
gctctccctcccaggatcctct

SEQ ID NO: 1929 - DNA, 22 bp, Homo sapiens
  source 1..22: mol_type = genomic DNA; note = MG71-2 AAVS1 Target Site C3
atcctctctggctccatcgtaa

SEQ ID NO: 1930 - DNA, 22 bp, Homo sapiens
  source 1..22: mol_type = genomic DNA; note = MG71-2 AAVS1 Target Site D3
tcctctctggctccatcgtaag

SEQ ID NO: 1931 - DNA, 22 bp, Homo sapiens
  source 1..22: mol_type = genomic DNA; note = MG71-2 AAVS1 Target Site E3
ccttagaggttctggcaaggag

SEQ ID NO: 1932 - DNA, 22 bp, Homo sapiens
  source 1..22: mol_type = genomic DNA; note = MG71-2 AAVS1 Target Site F3
agaggttctggcaaggagagag

SEQ ID NO: 1933 - DNA, 22 bp, Homo sapiens
  source 1..22: mol_type = genomic DNA; note = MG71-2 AAVS1 Target Site G3
atttcctggagccatctctctc

SEQ ID NO: 1934 - DNA, 22 bp, Homo sapiens
  source 1..22: mol_type = genomic DNA; note = MG71-2 AAVS1 Target Site H3
ctggagccatctctctccttgc

SEQ ID NO: 1935 - DNA, 22 bp, Homo sapiens
  source 1..22: mol_type = genomic DNA; note = MG71-2 AAVS1 Target Site A4
tggagccatctctctccttgcc

SEQ ID NO: 1936 - DNA, 22 bp, Homo sapiens
  source 1..22: mol_type = genomic DNA; note = MG71-2 AAVS1 Target Site B4
ctccttgccagaacctctaagg

SEQ ID NO: 1937 - DNA, 22 bp, Homo sapiens
  source 1..22: mol_type = genomic DNA; note = MG71-2 AAVS1 Target Site C4
gccagaacctctaaggtttgct

SEQ ID NO: 1938 - DNA, 22 bp, Homo sapiens
  source 1..22: mol_type = genomic DNA; note = MG71-2 AAVS1 Target Site D4
acctctaaggtttgcttacgat

SEQ ID NO: 1939 - DNA, 22 bp, Homo sapiens
  source 1..22: mol_type = genomic DNA; note = MG71-2 AAVS1 Target Site E4
gtttgcttacgatggagccaga

SEQ ID NO: 1940 - DNA, 22 bp, Homo sapiens
  source 1..22: mol_type = genomic DNA; note = MG71-2 AAVS1 Target Site F4
gccagagaggatcctgggaggg

SEQ ID NO: 1941 - DNA, 22 bp, Homo sapiens
  source 1..22: mol_type = genomic DNA; note = MG71-2 AAVS1 Target Site G4
tgcgtgacctgcccggttctca

SEQ ID NO: 1942 - DNA, 22 bp, Homo sapiens
  source 1..22: mol_type = genomic DNA; note = MG71-2 AAVS1 Target Site H4
gtgacctgcccggttctcagtg

SEQ ID NO: 1943 - DNA, 22 bp, Homo sapiens
  source 1..22: mol_type = genomic DNA; note = MG71-2 AAVS1 Target Site A5
gcccggttctcagtggccaccc

SEQ ID NO: 1944 - DNA, 22 bp, Homo sapiens
  source 1..22: mol_type = genomic DNA; note = MG71-2 AAVS1 Target Site B5
cggttctcagtggccaccctgc

SEQ ID NO: 1945 - DNA, 22 bp, Homo sapiens
  source 1..22: mol_type = genomic DNA; note = MG71-2 AAVS1 Target Site C5
gccaccctgcgctaccctctcc

SEQ ID NO: 1946 - DNA, 22 bp, Homo sapiens
  source 1..22: mol_type = genomic DNA; note = MG71-2 AAVS1 Target Site D5
ccaccctgcgctaccctctccc

SEQ ID NO: 1947 - DNA, 22 bp, Homo sapiens
  source 1..22: mol_type = genomic DNA; note = MG71-2 AAVS1 Target Site E5
tgcgctaccctctcccagaacc

SEQ ID NO: 1948 - DNA, 22 bp, Homo sapiens
  source 1..22: mol_type = genomic DNA; note = MG71-2 AAVS1 Target Site F5
gctaccctctcccagaacctga

SEQ ID NO: 1949 - DNA, 22 bp, Homo sapiens
  source 1..22: mol_type = genomic DNA; note = MG71-2 AAVS1 Target Site G5
cctctcccagaacctgagctgc

SEQ ID NO: 1950 - DNA, 22 bp, Homo sapiens
  source 1..22: mol_type = genomic DNA; note = MG71-2 AAVS1 Target Site H5
ccagaacctgagctgctctgac

SEQ ID NO: 1951 - DNA, 22 bp, Homo sapiens
  source 1..22: mol_type = genomic DNA; note = MG71-2 AAVS1 Target Site A6
ctgacgcggccgtctggtgcgt

SEQ ID NO: 1952 - DNA, 22 bp, Homo sapiens
  source 1..22: mol_type = genomic DNA; note = MG71-2 AAVS1 Target Site B6
acgcggccgtctggtgcgtttc

SEQ ID NO: 1953 - DNA, 22 bp, Homo sapiens
  source 1..22: mol_type = genomic DNA; note = MG71-2 AAVS1 Target Site C6
tctggtgcgtttcactgatcct

SEQ ID NO: 1954 - DNA, 22 bp, Homo sapiens
  source 1..22: mol_type = genomic DNA; note = MG71-2 AAVS1 Target Site D6
gcgtttcactgatcctggtgct

SEQ ID NO: 1955 - DNA, 22 bp, Homo sapiens
  source 1..22: mol_type = genomic DNA; note = MG71-2 AAVS1 Target Site E6
gatcctggtgctgcagcttcct

SEQ ID NO: 1956 - DNA, 22 bp, Homo sapiens
  source 1..22: mol_type = genomic DNA; note = MG71-2 AAVS1 Target Site F6
cccaagaggagaagcagtttgg

SEQ ID NO: 1957 - DNA, 22 bp, Homo sapiens
  source 1..22: mol_type = genomic DNA; note = MG71-2 AAVS1 Target Site G6
gaggagaagcagtttggaaaaa

SEQ ID NO: 1958 - DNA, 22 bp, Homo sapiens
  source 1..22: mol_type = genomic DNA; note = MG71-2 AAVS1 Target Site H6
aagcagtttggaaaaacaaaat

SEQ ID NO: 1959 - protein, 1140 aa, synthetic construct
  source 1..1140: note = MG140-149 reverse transcriptase
MQTERADSPSGSVTTISQDSHNPFYLIVYPIESDCTLCDFNCGNLNLKIRQHVIDEHAINNFKYGCKLCFKNYETINGVKAHYTACKRQPIATTTTTTTTTTSTATTTTSIRSTSPPSTTDPFQCAECLKASTIKIFKDRKGLTTHMRTKHPEEYETSKMVATKRIAWSNDEDRVLAKLELSLKEVQRGQILSRLHVGYNEIAAKSKAPSRSKEAIRGRRQQPDYKALMNEMIEELDATSDNDDSSSDVSIPAHTAIPASNCNIVNPRTGIHKYLEDILKDRSKVFNSETLDAIQKYLRDEDSDEILTKTMNGINEAIEMYREKHPPKLKCGKPKVSNNKKPIRNTKRQESARMHGYYQSLFYKNEKKLVTEILDGESSNVDPPPIAVAETYYKNIWSKPSKDDAPFELKVTTNTDELFAPISKEEIDNAIRNTKQDSAPGPDLVNWFETKGIVTELSAVFNIWLGIQRIPNQLKENKTILIPKSNTDQSNIKNWRPITISSMILRTYNKILGYRMNRVFKTNDKQVGFKPVNGCGINILWLHSLLKHARKNRNNIYACLIDVSKAFDSVSHESITRALRRNGAPTALINIITDQYTNANTVITYNDAHSQKINILCGVKQGDPLSSILFNLIIDELFDVLQDDHGYSIHGIGKTNARCFADDLCLISSTRIGMGELLRKTNVFLAERGLSINPAKCITIGLAKGYKGKKSKIETESLFDINGTPIPMLGYTDKTCRYLGINFTSIGAVDSKRIKRDIVEALHKITKIKLKAQCKLKLLRTYVIPRFLYQLVNSEIQPSFLKRIDICIRKTVRSILHLPMSLSNEFFYLPMKEGGLQFPDLSQVVGIAKIRLFKKITLLGDPMLKYLIEDQGNCINEKFIVNLNIGGTHTANEITHLKDQMMKEKRASYAKKVHSTGQEIFATCPLTNQWIQGNLKTMRTRTFINSIKLRTNSLETKVTTTRGLDTNKTCRMCNMADESLMHLLQCCPATKGLRYVRHHKICARVANKLIARGYQVYKEKSFPDPNRLGCTLRPDIIAIKDNRVLILDVSAIYERTGATFINAYQNKITRYDPILNAVKNHFDCSDGQVIGLIIGSRGSYYHNHLHIWHQLGLSTMDLKFIAIGCMEDSIKIASLSSLIR

SEQ ID NO: 1960 - protein, 1175 aa, synthetic construct
  source 1..1175: note = MG140-152 reverse transcriptase
MKTRTNTRVNVTRSVQSESIEIDKDEPSQESARSPPVVYRIDYPIGEERCSICVDRLPSQNLKIREHLSDVHGVQEIYYKCRICTKEYPNISSMKSHYPACVRKLGQQPTTNPTVDNHPQNPTTGQQHTTTSTGPVLSMFQCSVCHHLKVNYVAKDQKGLVTHMRTKHPNEYEESKKVANIRVAWHEDEDRLLATLEISLKAKQKGQILGRLCTEWNKIAVQSHANPRSKEAIRGRRQQPEYKAMLEEVQCRSNLLLQAADRTSNDNASSKESDSESPTDPAAVEDDTCMIHNLLRDILQSDNPGVSTFMKDAITALHNPQTAIDPVQQTMIGIQHSLSIIRNRNSCRTSRNFTSNRKPARNKSRIIKEKSHAYYQKLYLNNKSRLIDELIEGVPPHTDPPPIHTAVQHYEQIWSTMGVDQHPVQKIPDQRSIGSNFLSPITRVDIEWAIKRTKRDTAKGLDQVTLQEAKLLAKEDLYIAFNIWLCCQRIPRELKLNRTTLIPKGNTDLDNIKNWRPITISSLLLRLFNKIIGFRLNKIFELDKRQMGFRPINGCSLNIQWLHNLLKHARLHRRNLYVCLIDVAKAFDSIPHESIFRALTRFRASSSIIELIRDQYTNSSTTIAYKDLSSRRIRILRGVKQGDSLSPLLFNLVIDELFDILKDQFGYSIANIGSTNIKCFADDMCLISGSKSGMGVLIKDATTFLEHRGLQVNAKKCMSIGLAKAYKGKKSKIVTEPTFNIHGVEIPMLGYVEHTTKYLGIEFTSVGSINANVAKAKIEYVLDQLQQTPLKPQQKLDLIRSYIVPRFIYQLINLEIYPKILKQIDLLIRRSVRSILHLHQCLSTEFFYLPVRDGGLQIPLLRDIVGLAKVRIYKQVMKSDDTLLKHLVEAQGFFTIQRFIHELQLSSSFETTDIVQRKTQLVRDKRVSFGNKVHGHGFEVFSTCPMTNFWLYGDCKTMTGRSFINGIKLRSNTLETKVTLSRGMDVDKTCRLCKKQDESIMHVLQFCQGTQGLRYLRHNYVCARVVNKLRERGFTVYSEKVFLADVTGLDTLRPDILAVKDNQAYLLDVQCVYETSNASFINAYNLKTEIHTSHSNSKRSVWLYIGNNPRSDRWLTRFVLSPPSRHLVQFRFYIIRTKISSLKLSREFAPNNVNISRKCEKPTEKRVGIIKGKRR

SEQ ID NO: 1961 - protein, 1230 aa, synthetic construct
  source 1..1230: note = MG140-154 reverse transcriptase
MERSIRKNETLPRVSRQSNARPTCTSDAKARGPQPPSRPEGDGLKCLNPGCPFVSKTVDSFARHRCKFIPVAEKEPVGTSVVGVEERPASSGKPPPAGKRASRVCPVVRRTVVSRGERKAKPVPVIEEEPLSTPTTETEEPTASSWEDLPADDEAYGCPENNCSYECASVSELSKHRETHASASQGKKETTHPNKGEADDPGKPPTKQVHNCQYCVKSFGTKGGLTIHKRKTHPDEHNRENQQRKENESTGRHSWDESKHLVMANLELSYGELVRTGTLNSSTMGVNMFLQLSEPFKVGFSINQISMQRKGKKYQDVLRDRRCELAQIARLQYETPIEDQINVEEEEPSLPEFEAEPEDSKFEGKTLDAAYAALKQGDVETASDLASKVVKHLQDLSTDTKPKPPSRSRPDKQAKIPKKTNKRALRKQQYATTQKLWHKNRASCVKKVLSGRWTQPEPQPAHTPEQLHDTWSGIFGKPSPKYTGKAPPRAKITKTVGNPFTVTECSRILKEATDSAVGPDGVKLPLIREAGPTFMAKLMNIFLFTGKVPSSLKVARTILIPKSEKPSDAGDYRPISISSHIYRVYTSALGKRLSKDAGLNQRQRGFIAEDGCRDNLILLETIIAASKESCSGLNMAFVDMKKAFDSVSHSAIAESLDWFGVPKHLADAIKDLYVDCTTSVGHGEIKVTRGVKQGDPLSSILFNMCLEMALSNIDPKMGIRFKGHHIFYLAFADDLVILSPSAMGLQSLLDDLVRHCGDVGLEPNPKKCSSLSIVPDGRNKVVFVDDRRVFHLSGAPMGIMGAKSTYKYLGIDVGFRPDKRVIPLWDKFNSKLNSLTRAPLKPQQRMLVVRQYLIPQMTHVLVFSDASKKLLNRMDVKLRLNIRKWLGLPNDTHKSMFAASPEAGGLGIPSLTQTIPLLRLRRLAKLGESGDVILREVASNKRIQQRLTVARKHCKVEGLPYCTKEELKARLSESLWASADGRGLRNEQMYKRGLSFIRDGAFMTGKAYVSAVAVRGNLLQTPARLARGRLNRPGAGMCHKCHEGSVATLGHILQSCPKTHGLMVQRHDSVVTSLVEAIRQTTRNKRVFVEPRIKRVGDTDYVKPDIIVVNESQTYLIDVQILADAGCVEDLNSKAEIKTSKYDVRPVHLGVDAFLKTHSLEVVSPTKVHAFTLDWRGKVPEHTESVARELGVLKALEWIVPDMLLANRSIYTTWNKSTSRQGRFGKKIGT

SEQ ID NO: 1962 - protein, 1314 aa, synthetic construct
  source 1..1314: note = MG140-155 reverse transcriptase
VRDDEVVLYLPTGADLVCRVGRCGLTFLTPVSFYDHVTRAHRQTHRCRVICSNCGRTCKSAVGHAIHWGYGCKGRAPSKSGTKAFQCSECICTFTSERARSTHIRHEHPVLCNELRRFKNGLPLTEGVDAADIVQSVPDQGFLHLDEILKNVPLASEADRGELTQEGILRMVSLEASGALGGVAKMRLTGHIATQCGLEPSKPILDGIRTLRNTRKWKRALATVREQLGKRAEETSTPNLGRECSSPDDDPGLALAQEAEWLTDLQIDPSRVVTCNSSALGVEILPPSYGDCMAKSQPGAEITTCRIDPAGQEPVAPSGTAVKPRGRNWQPCVLKPPSEYLEIRREIETPTAEEKKSSLFVEPPLTLVHTYTPALGPAERHIVRHRHRRKEREKEEGQCVYERREFYGDPMLESLADGDMGPELVDGVLDGWLRDIGNCSNTIASKDNRGDNRGGRRTAEPKRVNSKRFKAKQRKKLSKRAAARLARQRAYLLHRGLYRDNRRKLARLLLDGAEDVGCDIEVGEVEREYRRIMSIKGSSCGVKGSVENYPEPEVRAKNSGLMVQVRAEEVQRHLKQVKRGSAPGPDAVKAESLKAWAGDCSRLAALFSAWLHSGRVSPSLKKSRSILLPKTNDRQQLKSLSRWRPLTIGCHILRLFNRILASRLSEAVSIHVRQRGFLKAVNGCAENLTLLTELLDGARRADAGSQLAVLFVDFSKAFDTIKHDYLWASLRRLGVGSPFVELIQNMYDGSMTSFKTRRGTTNPISIMRGVKQGCPLSPLLFSIAVDPLITQLEQLSLGKRVPGGGTVSCLSFADDTALVSDDPDKIQTMLDCISRFGELSGLELNPLKCEGFVIQSLGGKAGSTLNQNIIWRGKGKTVPILRPDSTLRYLGGTISAWCSPRTDGQNISQCEKYAECVDRASLKPTEKVQLWRECVLPRFLYDLQFKNPTKSYLSKLDEISCKMVKRWLRLPNCATNHFLWSARRHGGLGLPKMQAAGAITRIRTLMAATLSKDPVLVALARSLDYGSLARDLSRKFNLPAPKPGKPYKRIQWVLDEHEKWASKRCQGSGAMSFKSSLSNSWNASWDQNRDSGFAPGQIIAAQLLRVNLFPCGEVLARGSGREIPRCRWCRGRDTLGHISGECPGTRARRIRRHNKILEQVCAFMVGRGWLVEREPSIWHGGRLWRPDVIARLDKRIVVCDITCRWERVSNTFNSLEEGNLEKIKKYRVLRSTLEKRYGTKDIHFCGYTVGARGGWVKSSEVLLRHTDASETAIGGFISRTCSTALRQTIKVFGSHSDRFEPVGGGFDEDRLDTN

SEQ ID NO: 1963 - protein, 1078 aa, synthetic construct
  source 1..1078: note = MG140-156 reverse transcriptase
MNIPTTQNGDSSSAPERVTCGCGRDFATQRGLAIHQRKCLTTRGVSTSSIKCDLCDVEFSSAEGVSQHMRARHPAEYNARNAAGTAHKNQRWSTLEVERMAHLEARWGREMGPINKYLEHQMNGRPLESLKKKRQCADYRSLVARYRSELEEAADDDEVFLPSDVQVCVVPPSPPQNTGEIEYPSILGTPVPPRSAPPVMSSLEQRDATLPDQFVEACGTYHERELLEILFGSRADGVKAIDLMVAEIISPHRARGSGEQNASDGAAGSPKPTARTKRSEKRNSRARRYRLAQHMYTHDRARLARSILDDVPLVCDGTPSAEAIENTYAPILESASSGVHLEPTSDKTNSTKISSEQLIELNGPISNLEIINAFSLLKSKANGPDGVSCRRFETWDTGKRLLCFNLMFYWGYIPRELKECRTRLIPKQNIRLDDINNWRPITMGSVLLKTFSKLLLKRLSIVPIHQAQKGFTTDDGVVFNNALLDSIIRTRRAASRPYTIISLDLRRAFDTVEHAAIARALHSRGINGRFPNFIMESYRDCTTSITCGNQTSRRFAVRRGVKQGDPLSTGLFNLVIDQFISSLPVDCGICIENEYIPVLAYADDILLLAPTRREARLLLERAHDFFKNQGMDLNTKKCASLIVETVPRAKKLVARPEEYFTVNGQSIKPVTTDHFKYLGTHYSCFGTAKPTNALFQLEAQRLLKSPLKPAQKLYIATKHLFPRVLARLQHLRVSKTILGRANFIARALVKSILHLPKTTANAYLHAARKDGGLGIPDFIAIIPSIMYKRLGTCLESARGRPFAEVSFRKAQDKFLTIAGGIITSKDTRNRQTAEILEKSYSGNGIHQVGNVKRGSSWIETPPSNWTGSTYIKAIQLRGNLLPTRGIPSNPPGERKCRGGCKRDESLSHVVQGCFVTHEPRIARHNHTFSLLSKFARKSGWAAVHEPTVYLSDESTRKPDLILVNSQYAIVCDVGIYWEGERDLETSFADKLKKYNTEPMIQYMQRRFPDRTVVVHPFIVGARGTLAKSNNRLIDLLSISQADQAKLIHDVIVGSIACHSAFSKRVWCRRQFGYADATH

SEQ ID NO: 1964 - protein, 1199 aa, synthetic construct
  source 1..1199: note = MG140-157 reverse transcriptase
MSQVNNADDRQESGAKRTRASGTSEREDAHDAYCVFYPFDMNGACSRCSGSLGSSMASIEEHLKSHDITKLDYQCGVCHKSWPSWRSAIAHYNRSNCRHTTPSISTTTASTLTTTDEMETEETVKRTTTDTVATIAESTQQQQQEGQPALFYCSLCASGGWSKAVSLSQHMRHMHAEAYNATIEVATTKRRWTKDEVEVLAELEASIPIEDGAYINQILAQRFPSRTYEAIKSHRKRADYRDLVERLRHRGITTRRSEGTTHTGTDSASMTSSTNNNNNFSPNAIVNDGNCFADPGIDASSVPNDYPNTGIPMVVNDEEQYPDIRAYVLQHIMDGRVQLCERMRIAVDRFMTHTSQTVASAVDMSLEGIHQALERVPASDEASNRKKNSVGKPKSTKTKKKMNRFAHYQQLFKKNKSKLASEIFDSVDTSASKPPISDAYKHFQKIWEVEASDTAAVEDTATRGSQILLAPITREEITRVIGQTKHDTAVGPDELTLGRIRCIAGRELWCAFNIWIGMRQIPNLLKLNRTALLPKGSEGLDQIKNWRPITIASLLIRLYNKILAKRMQLVFETDRKQTGFKPMNGVGQNTALLHNILRHARTNKNNLFVCLLDVSKAFDSVPHDSIKRALRKVGCPKEMIELIGEQYTDISTTIAYGTDSSPTIKINRGVKQGDPMSSILFNLVIDELFEIIGDRFGYEIPGVGSVNARAFADDIALMSSSEIGMQQLLSLTEKFLSDRGLELNVKKCIAICLRKAGKVKKSQVADASVKNPPIFKVKDEPIRLLGVKEQCKYLGIHYTPLGAVDPRESVSKLRLALTSLSKAPLKPQQKVVMLRTHLIPRFLHSFTYTECYPKLLGQQDRLIRRWLKTTLKLPASLSSDFFYLPTKEGGLGIGKIYDLVGFAKIRLYSMFARSGDVCLQYLVETQGSSMHARWCQAMKVSYRPPVAELNKRKIVIRDEGRDRFIQTVHGSAHEVFQSSPITNQWLSGQTRIMRGSTFIRSIQMRTNTTPTRVSTTRGRNSIKICRRCGLADETLIHILQTCPITQGMRCQRHNNVCRRVADKLRSKGFQVFSEQGIPSPGLQTNISRPDLIATRGDQALVLDVTCVFETGKHSLTEAYRRKVTRYESLVETIKEKYSVTTVEFHGLCIGSRGAIEPRHLSIWHSIGFSGTELGVLAVSVMEDSLRTITLFNNANKIRV

SEQ ID NO: 1965 - protein, 1067 aa, synthetic construct
  source 1..1067: note = MG140-158 reverse transcriptase
MYEEIMLRGPATAGPVIFAEGAAGVEPQMVICELCTRSFQGQRGLHVHQRRAHPPEYHAQHQVLPRVKARWISEESRRMAEQEALLRLSGVQPRDINKRLTEKFPNRSYESMKGERKKDSYQKLVSELVLMAPVPESEIPTQTPTGPQVEDPVPMDRSLWKVEVLACIKDLIEKRGSPEEEPLWDSLTSAFVSLSGGTVDLSDVKVCLDLHAKRLTDLLGPKRKRRRPPRKVPRKRTRRFAKTGDEANNSSAADGAAATAAPSKRTRSQRKPNPARIARSQAYGRVQAAFRKNRKRCADMILEGKWEEEATTLRLEEQEAFWRPLFEEPSMPDDRPVLKIPENWQIVDPISIGEVVKALADSEESAPGSDEITLVSLRSVSPSMLAASYNLWLLAGFCPDRFVIGETILIPKDGDLKNPANYRPITVASRVTRVFHKIIAARLTNSVPLDPRQKAFRPVDGCADNVYLLDSLLKDAQRRRRPLNLAFLDVAKAFDSVSHYTLARCLRRQGVPEPLVEYVCGTLANSSTVLKVQGRKSTPIVCGRGVRQGDPLSAILFNLVIDEVIAGLSKSIGFELSENLVVRCLAFADDLVLVATSADGLRDQMFHVIEGLRNGGMLINPDKCASLRIDVDGRAKRWVVNPSPFLVLQDKQIKALDIVGTYKYLGLQAGAKGLRKAYGSFLQEKLDWLSRAPLKPQQRMYILRCHLLPRMYHGLVLGETNSTALDQYDRMVRRTIRKWLRLPHDTVAAYYHAKVVDGGLEIPRLRYSIPVMKNRRMAKLESSLDPVMQWVANSPCFLGAKVRSSKAAKVVGQTLDTGRDVQRLLANQLHTTADGRGLRHQRQSPHVNNWVRDGSNLLSGGDYLEAVLVRGNLFQTPERATRGRRTVPPMCDAGCNSTCTLAHMSQSCMRTHRLRCERHNSVLEFIVNRAIAMRHNVVREPVVPTRAGRRKPDLVAEVDGSVLVVDVTIVSDQCNLNTPFKAKVDYYSTDDVKAWVAASYPGKPVEFGAVVFNWRGALNLKSSVLLRRLGVSARDETLLSCRVLTFTANMFKAFTRSTVRKECRSSR

SEQ ID NO: 1966 - protein, 1069 aa, synthetic construct
  source 1..1069: note = MG140-159 reverse transcriptase
MSVNSSERSVGRPIDPGHLENNLGELEVQAWHQCDLCVKQFSTERGLKIHKGLSHKMSNERRPIPQKVKWWTEEEMRLLAHVEYDVRGGGSKGNVGDIVAAFWALGSERPRSGIAQQLNMPKYLSIKDCVWKEREIVNQGVDGSNNNVSNESVSNNVSIGNVDNNDVASDASGDPNSKERWLRRVLCLNLKPEDEEYNGTFSEQWLDEIVVRAISGVDASLIGVELNEYFSAMADGRQVVFKKGPSGPKVVGKNLKRLQFMRTQIDFTKNRSRTVKNILSGVSSNGKSPLDIPGFFDHWADTFKPASNISTTELVQDSNEWSAWDPVVTSEIQAIIQGMDMKKSAGPDRISLSEIKGAPMRVLSKWFNLFIYCGRVPACLKRSRTVFIPKKNEPVSASDYRPISMSSAVLRLFNKILAKRLIGCVKFDHRQKAFLPMDGCAENVMLLETVLDEARKRKKTVFVASLDMRNAYGSVGHEAVVEALRCKGADAKTIEYVRDLYTEYSTVLSVKQEEKNVHVQRGILQGCCLSPVLFNMVMDQLLKKLPNGVGFPLSESIIVNGMAFADDLYLVSTSAVGMSVMLSAVENAARPLGLEFNAQKCSMLVIQSLRGRQTFVDTSFSFKVGGEIIPCLCEGEPLKYLGAFVMPSGKLISGKLLLEEWLGRLKAAPLHAQQKLYALRIHVIPKLIHRLCFSRMNVVELRKLDARIRKFLCGLHGILHLPSSTPKAFFYTSIAEGGLGLMSFRRSIPAMIIRRFERLQVSQCPTISYAAKMSANCTRIASASAALENYEEILGDNRETIRETHKRELYDKVDGNGLKQAGKVRYIHSWVGDGTMCLTGAQFINAIKLRINALSTLSRTTRGRSLSRQCRAGCTKPESNEHVMQICPVNDRMRRFRHDRVVERVALFLEEKGWAVISEPTIWAIDREWKPDITARKGLRAVVIDVHIVGDNVCLESAYDQKVQKYRDAPGLDAKIRELWQGVETVDYGAVVFSRRGLLGAKSEEFRKSVGLTQLNMSQMARNVIVNSLRCIWNFKSVTKSWYVPSTNSGRRNTLAPLASASGVRSNSC

SEQ ID NO: 1967 - protein, 1107 aa, synthetic construct
  source 1..1107: note = MG140-160 reverse transcriptase
MLPKLNLQIRDHVEKCHGVYVFSYVCSNCDTPFEKINSIKNHFPACKRKKTAVAAQDHTVKKVASVPVTDSLECEECKKNQASFVAKCRKGLVTHMRSKHRNAYEESKTVASKRIAWSQDEDKVLAKLEISLKHQHKGQILDRLFCEWNKIAHKAQANHRSKEAIRGRRQQPEYKVLLNSLRNSNSQNVHSDVSESGSESEKDNETDSDTDDYNTSMDAIVKVLESIVTRKGEMLSGHMQDAIDAFCTSDPSRDPVELSMMGIRERVEMIKRNVRTVNGRGPRKKECRNQSRKRKAERHFQNLYAKNKPRLVDEIIDGIGEDSDPPPIEIAIRHYEQIWASTTQGSRMTELAAGAVDQSTAHIMKPVTSDEVTWAIRRTKQDSAKGLDQISLQEIRTLADPALLVAYNIWLGCKRIPAEVKRNRTTLLPKGKDELDKISNWRPTTISSLLLRIFNKILCRRLSQTLKTDDRQMGFKPVNGCSMNISWLHHLLKHARHQKRDLYVCLIDVAKAFDSVPHVAIFNALTRNKLPSSFIDLIKDQYYNSSTTIVYRDLSSRTIRIKRGVKQGDPLSPLLFNLVMDELMGRIGDQYGYAIEDIGSTNIKCFADDICLTSGSRMGMNQLIEYTVKFLEEKGLQVNAKKCVTIGLAKGYKGKKSKIIAEPVFSINNVHIPMLGYRENRTKYLGVKFTSEGTEHANGTLTQFTEALRRLAAASLRPHQKIVLLRSYIIPRFLFQWINLEVYPQLLKKIDLVIRQTIRDILHLPRGLSTEFFSIPVRDGGLQIPLVQEVVSLAKVRIYKSIMGSTDNVLKYLAEMHGYPIIRKYVANLQLTGTYEKEDLEQQKKRLSSERKASYAKKVHGYGSTVFSGCPLANTWLHGTTRTMSGRSFINSIKLRTNSLETKVTLTRGMLTDKQCRRCQKEQESIMHVLQFCPSTHGLRCKRHDLISSKVAAKLKERGFTVYEEKRFRVQRENLTILKPDLIAIKGRTAYILDVQIVYETSDAAFINAYQRKVEKYTPLIEQVEAHHDCRVEAIHGLIIGARGSFYHGHLHIWHGLHFNKNDLKYLAINCMENSLRIMYTFWKSTGAGGKNRCATMITAGQSTGLS

SEQ ID NO: 1968 - protein, 1252 aa, synthetic construct
  source 1..1252: note = MG140-161 reverse transcriptase
MNRVTSQVAISIANMASFPLGTSFPLGTSSTGLVPIRCNEGNNKVLLPAANTPAQEDVCEGEQIRIRPTILIEKGGLMFINGARTLAENIPIWLGHDATDCEMDDTRTWTELVIESDSTVAITVPYTTSTCCKEVFISHSELDKHLSVAHSDAFRRYVCALCMRSRARYRQIAVHYAFCLRSNRKEAVASTPSTLDGPEASLCDTNPYISLAAESSPEDTEEGDLSRRAIPVTKPTFECKECDRSFPTKIGLSQHERYKHPNLRNANRIADQEKDIERKRKARSDSKKLTEETGTTSKPKKSLWTEVEIELLVQLEVELSGARFINMAIAERMPGKTNKQISDKRKSLKSQVTSKARTKKVQNPTPTLVQDTTVVQSEPTIPREDMFNNAICNSGLECVGMSAELLTQAIEGKDIDGLQDKLITIIKSACSKPIKAKPNGPANSTENPSGKKKNKQEEYRRVQNLYSRRRKQLATEILDCKVGSTKCDIDPQIVQETYEGRFGGESQEVNLSKYPNAKPADNNVLIEPITQQEIQKAYSRAKKDSASGPDGIGLKKLKELDPQFAMTSNLYNVWLYTGKVPMEIKENRSILLPKGTTGLENVDNWRPLTISSVMLRLYTNILAKRVIKGVPLNPRQRGFIEAPGCSENGFLLQRIQKHAKRNRKRLSVVFLDLAKAFDTVSHKHIQQGLKRFCVNDHFIETVVDLYTDASTHFTLAKGETSKIPMTRGVKQGDPLSPLLFNIAMDPLLEAISAQNNGYKWDESGLQLEALCYADDNGLLTEDPKDMQENLEVVNEFCRATGMKLNVKKSAGYDIKPSANRSYVINDFHPKWVVDGQKLPLIAPADSTKYLGVKVNSWNGVTKEDLGEKLELWCSRINKASLKPRQKLVMLNQYAIGRLQFYLSQVETSQGKLLEMDLTVRRYAKQWLKLPECATDHILYAGTDKGGLSLPRLSLSVPCSRINVKRAVLNSSDESIRAFAVETGLPEEIDTDADHFRIKVPANPKRGAKWRQLEANRWRKLKVAGKGHRAFGHKCSNSWMRNENNYFNEGDFITGLKLRTDTYPTKVTLARAGNTGGDVACRRCKAAPETVGHISGQCPAVKGYRINRHNGICGILSDRLKEKGWTVALEPRIKAADGKTLIPDIIAVKDRQAVVIDPTIIYENSDHSLQSANKAKIQKYSPLTNEIKTLYGADKVEFHGLAIGARGGWCSQNTKCLTSVGLHDTGFHAMLCRYALRGTINLLRTFTDLHGPK

SEQ ID NO: 1969 - protein, 1112 aa, synthetic construct
  source 1..1112: note = MG140-162 reverse transcriptase
MARAHREVTDQATKEDHNSRRLVRWTPAELLDLAEKEALLMKKGVKFMNEALFPLCPGRSLEAIKGQRRKEAHKELVKAELAKLVTEGLRTAGDEGEGASVEGEEGRGEGQGPSRSGPASGTLDTTQGHLNQRMEPERQNDRQNPRLGTEGRATGLAHLRRDALREGQRQIDMTDSQPEGEEHLTPNVAELLQGAEREVEDGESSCIWTQDVATQEELNEFIRKSTLTTAQSKNAKYEHCRILKGQMELYKDIIGNVWDHEEETGVGADRKVIDDWVREQLLKWVRWEGNPKPKPVRQPDKKQPFISKKKEKARLRQLTQSFYERSPSRCINAVLSGNLEVTQAIPKKELEEYWASIFSRKPEGVVKVDTINRPADTSYSSPISLDEIKEGLRNLKDNSPGPDGLKKSDVAKIPVQVLHAMLLIFQGSSYTPKFLRLGNVTLVPKNAKPENPGQYRPITVTSQLLRLYHGILAKRLVRLPLSKRQKAFLPRDGIAENAFIIEHLIKGARARREDLFLVFMDVAKAFDSLAHTSLLQAAERIGIPSSLREYIALVYEEAEIQFKGGEKKIKQTMGIRQGCQKSAPLFDASLDMCYEKLDPRIGYRVPDPAAPQELCSITQKMRPGGYDITEALFADDGVTVAATRIGSVKNTLLAVRELGKCGMKMNPKKCATLAIRANGRLKKSYVDPTPYLTIDGEVVPALKLGETYKYLGLKIGANGYDIREITKKLIVQLDRLSEASFKPQQRLHALKVNVIGGMLHTLVLVPVSLKTLLNIDRTIRRYVRKWLHLQSDTPTAMFHANTADGGLGIPSMVTRIPRLRRARLVKMTTSDDPLIKIMVSSGTGEAAVRLASGIKRLGEVQIINKQSERRAWREELISKTDGRGLQYHDGFGDGWILDPMFPAKGGEFIKALRVRCNAMKTPARAARGDRGDPTCRLDKQTANATHISQICQVTHGLRVRRHDGIVKMVRAGLQRIGYTVQLEPKIAIEGTFVKPDIVAWRKDKGFVIDPIICGDNCDPEERYRQKVMTYDKEAVRKYVKEEALRVSGANVKEVEVHGFAINFRGGWSTSTQKLLSRLGLGTSLKHFISIRTLTTTWTIIQTYDRVSLGYRK

SEQ ID NO: 1970 - protein, 1041 aa, synthetic construct
  source 1..1041: note = MG140-163 reverse transcriptase
MCGLAAQSIVHTAATEQHKEKGVGSAATDSVCMAGGPSGSPPESSSSCPRCSRVFKSYRGMRVHFRLVHADEFHQVELENVRRQDHKTRWEESEVIEMANREVSLVREKVRFINKELIKYFPNMTVEAIKGKRREATYKKLVKDLLESGPSTAVSPSPVVDPSPSVSPVSPVVRLRIPSVSCDADPDSTLIIGWIGYYLSDLNDRDDIGPPPSEAELNQLDVAVACASEEPERALRLAFAYICSRLELRMIKPRLRKVENVMVDKKKLSKRRRRKIEFAKFQGLYRKNRRSAADAIFNSSSISSNLSDSMVFGYWKDTFTRSDLNVPPLPLFPSPCTQLDVDVLALVTPEEVSSCSLRVGTAPGPDGLTMGDLRKVPVRALAKLFSCWLLARRVNIEFLDSKTVFIPKGREVDTPSKLRPISISSVLVRWWHKILSHRIGLVVNASEYQFGFQPVDGCEQATGMLNKIIRHCKSKFKSLAFASIDLHKAFDSVAHNLLFDVLKSVGLPSHLIDYLRFVYDCGRTYLCFKGSISLPVHPTRGVRQGDPLSPLFFNLGMDWVLGRLFPHLGFRFEENCITHLAYADDVVLISNSVSNLRKLFEQFVEGVQFCGMELNLEKSFTVCWQGDGKRKKVLYDNVSVLSFRNRPIRSLDPGECFTYLGVQFTPNGLARDIKLELMDYLESLKCSLLLPQQKLFLLINNLIPKFIHRLVLGDPYVGTLNKLDNIIRKFLRQLLHLPHDIPNVFFYACIPDGGLGVQCLRWFIPVLTFKRRGILAPSAKFRMFEGVCFSSTSAILDKFRKDLYRSPDGKGLTQSSRVPTAHHWVKKGTRFLSGRDYISCLHVRLGCLFSKSRGGRGRKVDKTCSRGCNAPETLNHMIQSCYSTHKMRIKRHDAVCKLLARQLDTKGFSVFREKVFETSVGKLKPDLVAYREDRVLVVDAQIINDQFHLEEAHYNKIQKYDSPLRDILTPQRGKVDFTSLTVSFRDNVSFNSFKDLSSFGIMSRNFLKKVVTQTLLGGAICWSVFQCMTTRVTPAERTGVD

SEQ ID NO: 1971 - protein, 1090 aa, synthetic construct
  source 1..1090: note = MG140-164 reverse transcriptase
VRCPIAEIMEKTYVENLASTEASSNRRGKEEFTCGCGKFYKSKSGFNNHRRTCNHESVPVTKVFVCEIEECRVSFSTKIGLGQHQRKTHAVQHHDNRVEELRHKKGEWLDEQLFLLAESEIVLTTKGVKFINVELQKIFPNRTLESIRNIRKMAKYKEVICTVKERAIKQLPAACVSSEFSSFSGGHINPPCADAEFPAGGDINPPCYDEVLSLQALVDVITSGCNKLGGKFGVLLNSVRSENLNACSTLIDEIVSDLCIKRVISRVKPIKIQKEIIAPIAKRKKWSPSSCKRRKEYYKMQTLFVLDRKRAAHMAINGSWRDENVSKLPDEVMIDYWKNVFSVCGIPDSRPADNPVNVHWDMVNPITHEEVKRTIKTMSKSAAGPDGMPPEDLRSLDVEAVCVVFNSILWLQDSVPSFCRSRTCFIPKVSSPSSPADFRPISISNAIARLFHRILAKRASLLCELRYQQKAFREVDGVPMNTMILEAVIEESKKSCRSVFVAFLDISKAFDTVEHSSIIRAATRIGFPNPLLYYLRKFYRNGSSSLFDADVEIKRGVRQGDPLSPFLFNAIIDKCVEAVSNLDIGFSINGVKFTITCFADDIVLFAESREGLQRLINLICVELRMCGLELNPTKCASFSIIADKHNKQWFCDRNSIVTVNNLPVRGISILESLRYLGLQFSPNGKVKNSLQHCRIICENLRSAPLKPQQRLAILRDFAVPCLLFTAVLGRWNCNWLKRMDLVVRKFVRGSLHLPHDTPLGFFHAAAKFGGLGIFSFRTRIPLMYNVRMEKIGACTEPDITALLGSLYFRIKMAKRLTSTTGQSAFTSKSNEEMFHRSALYSCKDGKGLNFSFDVKCVNAWVTDGSKLLSGENFIKAIKIRGNLLYTETRSSRGRQPATNCPAGCNARASLGHILQSCSRAHDKIVSRHNAVVKLLAQMTIARKYKVISEYKFSTNAGLRKPDLLIWNGNSCFIVDVTITSDAGLGENILRRANQAKVSYYNKSEIVEEALRFTGTTQVSFGALTISWRGAVSVDSAVFLREMDITNRDLKLLSVRCLENSSIIYENWKRRTTVTRRKWTADRRIGDRAFV

SEQ ID NO: 1972 - protein, 1247 aa, synthetic construct
  source 1..1247: note = MG140-165 reverse transcriptase
MENAEGASNLNLDFGGYGPAHRRRLRPPRGPSDDDLDTNHRDATSALPNTTSYEILLPVPFTSRSCEICLQQKKGDYILLNLNAAIQHAKSHHYGVSVLYACNTCGKTYIGKHAAQCHVPKCRGPPNMEGKDVICQTCKKAFRSQRGLSTHERLMHPLERNEKREKAASNKQTRGPNKGFGKVWSKEEVDTMLRLERSLRGNPRIAKQMMEYLPGKTAKQIRDKRKEPSYKILLKQYASTYESSAAPEPLNILSEGSDNEIEIKRKYRRRCISETEDETNSDKGDATRQLSPSSPVSETAAPGREPAAQHELVPDLPRLACDVLTPSRTHAVDRTINPLSPIGAEINPSDDDRANEQQWRIDTICQALAETRDSANVSNQYRDLHVRLVSILRDISVNNEQITQTLIDDIYSQVLAHIAPSQATKARKRQKTKGHGSQACRGRKRRRYRYARTQDLYKKNPNLLAKYIREGVSWLEEEETGSPKSEDVKTFYTSLWGTSPDITIPFTATGGPGHKALDLGEVFQAITARDVNERLNHTRHNTASGLGGIQRKDIIGLDIKDILRILFNLILVSKMQPTAWNANKTILIPKQGKGSSRVKNYRPLTIGSLIGRTYWGIIDKKLRNVITFSPRQKCFVHETGCFNNVHILNETIKAGKTRNGLVAIQLDIAKAFDTVPHKAVDAALERLGLPTLIRESIMNWYTNLSTVIEYRGSKSEVSLKRGVKQGDPLSPFIFNAIMDPLLQRLEQMKGYEINESHNLSALAFADDLILLANTKEKAQNLLQYTESYLNNLGMRIAAEKCASFEIRTMKDTWYMINPDLHLSNGEIIPYSAADSSIRYLGGHISPWSGLHYRDIVDLLASTLERCRGAQLKPHQKLFLTTSHIIPHFLHKAVLATPPISTIRAMDQIIRNHVKVVLHLPMSTPNGLLYCSKRDGGLGITKLEALVTNTSLKQGITLLNTLDPAIHALLQETKLEQPLISLAKAIRLPWPILNFRVIDSYKKRVKEDELKNWSQMKTKGRGVTAFKDDRDGNAWLYNPNLLRPSRFLTALRLRGGMTSDKVTMNKVVPQLNVKCRKCKSCNETLAHILGQCIHTKSQRIRRHDEIRDFVSRKLASKKEEISIIEETLIPTQTGNLKPDLVVVNQGRVHVVDVTVRHEDTGYLDEGYRSKVDKYTPILDILVHQLKVEKGRVLPIVVGTRGCMPVTTIESLNEIHIKDRGSYITIALLALRHSIEIYHTFMDYDRKDT

SEQ ID NO: 1973 - protein, 1205 aa, synthetic construct
  source 1..1205: note = MG140-166 reverse transcriptase
MQPNMMANDYNDASDFDGHGPIHRRRLRPTRGPPNDEPAMDTDNASSNGCPPEANSTAPVTEISLPYLTHSCNRCLEQGLGQYILLNINNAERHFKVHHRGERLLYRCSSCEKRYESKHAALCHAPKCPGPKEPIIAGITCDICHRTFSSQRGLAQHERIVHPATRNQNRANQANSDTQRPIAKGYGKIWTKTDIDLMIQLELRLTGHPRIAKEMGTHFPGKTIKQIRDKRKEASYKKLLQSHLDGPTEDVNPPLGLGEETYIDLSGADSTTGSGPNPQMEESRGEEPRDMSEEITRSIPTPMADIEAQGPAVLHTPNANWISQITDQVLEKAPNHDTADESHRALYAHLTSVLQDARENRGVITQGLIDEIYTETKLLILKESHPKERTRPRPSRRADGHKKRKHKRYLYARTQDLYKRNPSTLAKYIREDVNWLSDEGVEVSQEDISLFYTNLWGTAPDINLPFDTRTMADETIDILEFSAITVQEIQARINRLKKDTAAGPDHIEKRHITSQHAKEAMRLMFNIILISGTLPSAWGTNRTVLIPKQGKDTRNIENYRPITIGSILSRIYLGIIDNRLRERTTFSPRQKGFVNEAGCFNNVHILNEILRAAKLNSGITVIQLDISKAFDTVPHKAIPPALKRLGVPAEIISSISASYEHITTNICHKGSKAEINLQRGVKQGDPLSPYIFNAIMDPLIEQLETLQGYHIDASNTISTLAFADDILLLADNRDKAHELLHHTETYLKQLGMQIAPTKCTSFEIKTSRGTWYIADPDIRLGTNIRIPATPANGTLTYLGGRISPWFGLQHSDLENKLRATLRRLGSTLLKPHQKLMLLSTYIIPHFLHATTLTTPPITTIRGLDSIVRTYVKEFLHLPSCTPNGLLYCSKRDGGLGIPKFEILSVTTALKQGITLLNTLDPAAQALFRLTLLEKRLEKMAKSARLLWPIQNFRSIDAYKQRLKKAELEQWSKLPSKGKSVLSFANDRYGNEWLYNPELLKPCRFITALRMRSGTTSDRVTISKAIPQSSVTCRRCKSSLETLAHIVGQCINTKPQRIRRHNDIRDFVSKKLASNTDKFQIIEEASVETPTGALKPDLAVISQGRVHVVDVTVRHEDMGYLEGGHRSKVEKYKPLLPILAEQLQVTPGTVLPIVVGTRGAMPKATIASLSDLGISDRSSLITISLLALRSSIEMYLAFLDYDAPGR

SEQ ID NO: 1974 - protein, 1226 aa, synthetic construct
  source 1..1226: note = MG140-167 reverse transcriptase
MYNQSKNHRAGSSVNYYEGRVWKHGQFPSGTSFIRCAGEQRRNDSAHQGLGHGLVLSTSADKGLTEPPKSRSPVSQQRIGRTHHPFLPTLQYYSQGGWKDSLGRQTRLHEDVGEATDDDEEVRTVGICPEEREGGFSILIPSKAWTCHLCPLRGDYDTMRRLVNHLHDQHRGIEYVFRCRKCGRSGEMHGTEVHAGKCKGYTSCPVPDSHPHQCEECPMSFTTKTGLGQHVRHKHPVLANIKRIAAPQIEKAMKKSQRAVGMIRLWDAVSTRALVRILAEVGQGRGHLEQVRVGLEALGYAFSVKQISDRKRTKAFIQMSDNAVTATVAPQPQSPPRVYSTGGTVRAATGPKAPASQSLKEVLDGAQISKHLGHLCGQAMEVLEKAEDGKDEDSVMCQILKELSSALQAEKPVGKSQGTERDRKGKPRRSKKLSKRANQKANKYRSLQTSWRTNRRNAVRTVLDNMEQTGCEIPPEEVEETYRERFEKTSPKVDLSRFPPPKVNITDEGLDVMGQPITPSEVIKALKGTKAMTAAGPDGVAAHQIKMKCGDGVLLSIIFNTWLTSRKIPPYLKESRSILLPKTKQDLEKIGNWRPLTIGSVLTRLYAKILAKRLSDQIPLNPMQRGFIPAPGVSENTVLLKRIIREAKKKRGTLAVAFLDLAKAFDTVSHDLVQKGMKRFGIPEHLCEVVGDMYEGATTRFKVRGGETGPLHIRSGVKQGDPLSPILFDMAMDPLFCLLEAEGVAWNASRSTPVVAMGYADDTAVLSRTLDGMKKNLRLVSRYCDAVGLQLNVKKSYVFIIKSSGKTFTVNDCDPLTISGQPIPWVGPDQSTKYLGKQFGPWVGLERPRLLAKLKEWSERIRGAPLKPEQKVEIWRDTVIPRLASSLVNSGPPKAQLVELDTVIRKGVKTCLHLPEQTTDQLFYTPLRRGGLGLLQLEMHVPRLEGKVLKALANTKDEHIARLAEALGIPQESLAVTPVCLPRYHHTWAKQPVQGKGVETWAYHPVANHWLKGKTLSSGEFIAALQLRTNTYPTRECIARYKKGLNVRCRRCGSSVETVGHVSGACPAVKKARIKRHESICTIVAKKAAGVGWDVKWEPTFMVDGASLRPDLVLVRRDTVILVDPTVVWDGRKEDLAKARKTKRDKYECLRQSLADKYLPDVASPKIIIEGLPIGARGGWLSNNDWLLKQMGLGSKGAAKALSIRAIGGTLRLLQIFSDVSFMRFG

SEQ ID NO: 1975 - protein, 1009 aa, synthetic construct
  source 1..1009: note = MG140-168 reverse transcriptase
MSGATVVGGTGSDQSPECPTCGLIYASFKGRRLHERLAHPEAFHSAEDARLTARPKPRWDPEELSLMAAYERAHRGEANINISIARDVLPHRSLESIKGKRRSAVYRALLAVGAVSEDQPHDSIPTGEELPGAPSRPQLPPSSPASDTETQEGEGPPARVEPPLQVALQNTLEGLSNILAVAVPLNTENIQSKLDEWSPPRSVTCSRPERRSRRRHLPRSQKGRRRMQYARFQHAWKKDRGRAAKRVVDGDNWLGEERPLPEGTTDFWLSLYERPSPPPVPGRILPARDCVEREIWKPISVEDVKMALRATKAETARGLDGRCKADIEALGMDKLRWLLNAVLFMGLPPASWVRGRTVLIPKIDEPSTPSDYRPLTITPVLTRILNRVLAKRVSTWAPLPRSQRGFREEEGCAANILLLKAALRHAKAVPSPLYMAFIDFKKAFDSVGYPAIVQACHRWGLGSKLSSYVENMYKKATTTVDGVLVTPTIGVMQGDPLSPLLFNMTLDWALSAAPQEVGVVIGGTKFQYLAFADDVVLLATSPVGLRRSVGAVTTAAARLGLEVGHQKCASLAIAADKKRRKWVQSKIELHIGGQAIRALTPGKFYKYLGIQVGSTEWAEGPSRLLARLVTGLGRLQRSPAKPQQKMWMLVNSLLPQLVYPLLHSEARAGTLKRLDREVRKFARKAFHLPHDTPVGYFHAAVRDGGLGIFPFCSRIPRLKSDLLSRLSRLSPDPSVRAVAEGASGPHPCETSSSRKRLEEEEWRNRLYDSYDGRGLEGCRQTPVSSSWLSDGTGLMRGGSFIRALKLRGNLMATQTRCARGRQRPSVACDLCHGMRPESLGHILQQCPAVAGKRIARHDGLLDLYVTSLQKQGYQVRREPAIPTPAGVRYPDIVFWRGGTAYVVDVQVVADAAVGNLDTAHRRKVTHYDVPEIRDYVVSLTGNHPIFSSFTISWRGVVALPSCNTWDSLGLPKATLKLMVVRALEGGAAIHTAYRNTSGAKVRRVPRVRD

SEQ ID NO: 1976 - protein, 1331 aa, synthetic construct
  source 1..1331: note = MG140-169 reverse transcriptase
MIVPLVFNGQDHPSGLSKWVPVRLGMGSTLRWRSCPACVFEVGHVWNWRINLPSGRWDQPLGELSRVPNGTGATASSPPLPVRKTISVAIQVQESDWPICPEVPSVVSESTAYAGSARSVESVEGARDPQPGEVDVASESTAYAGSARSVESVEGARDPQPRGVEVQERDWPILPEVPSVVSESTAYAGSARSEEPVEGAREPQPGEVVGAMYTLPEVVRADSPRVGADTLNEVRVLLPWLASDCPLCGVQVKGIVALGKHFAIRHAGVTAMYVCGKCGRSNISRHSISCHVPKCGGGVAAAGVEGEPASGFACDLCDARFPTPVGVSQHKRHAHAAAWNEVRLARRKVPGGEIRATKLWSVGEVQTLIQLIREHGDTVATYQLIAVELGNGKTAEQVRSKRRLLKIDMAGDCSNIAEEEDCSLSDPIPQAERSSPPSPQVLSSDRIREALVGWGDREGGDEVRAIASLVKDVDQNPFLIESSASELISKLGGGVERTGRARPPVREQNQARGWVRRLAQRRRAYRECQYWYSRDQARLAAQILDGAESQECALPPDQIYEAFRERWEGGGQFHGLGEFRTDLVSDNWEFYNPILAAEVRENLSKMSNGTAPGPDRISKKGLLDWDPRGEQLARLFTTWLVRGVIPRAFKECRTTLLPKSTDPGELQSVNGWRPVTIGSMVLRLFSRILSMRMARACPLNPRQKGFLASSSGCAENLLMLDEIIRRSREDGSPLAVVFVDFAKAFDSIAHEHILCALGERRVDTHVIELIRNSYVDCVTRVNCVAGYTQPIHINRGVKQGDPLSPLLFNLAMDPLIHRLELARFGLQWGDQGRISTLVFADDLVLVAGSVEAMNGSLGILEEFCQRTGLSVQPKKCHGFYMDKGVVNGCEAWRIGGAPIHMIPPGESVRYLGVQVGPGQGIVTPDLIPMVRSWVMRISEAPLKPSQRLRLTNTFVLPRLMYQADLGKVPATKLAQIDGLVRKAVKQWLHLPPSAGNGLLYSRVRDGGLGVLRLERLIPSIQVRRLYQMSRSPDLWTRTLTKRAVMQLDWEKLWIKAGGDAGSVPVMGTGEANPPDAGSPPVYPDWRRGENLAWAALEVQGVGVDQFRGDTISNSWIADPSAVGFRQRHWIAGLAVRTGVYPTKEFLARGRDKSGAACRRCLARLESCSHILGQCAWVQGSRIRRHNKVCELLATEAERYGWTVTREFRVDGPEGGLRIPDLVCKKADTVFVIDVTIRYELDGDTLARAASEKVARYLPVAAEIARRIGGRCAEVRGFPVGARGKWPSSNNTVLMELGIPVGRRRAFARLVSRRTLLYSLDVLRDFLREPEG

SEQ ID NO: 1977 - protein, 1240 aa, synthetic construct
  source 1..1240: note = MG140-170 reverse transcriptase
VQESGGVRGNSATTSSQENSSDTYCLYYPFETNRVCERCHEELGSTTTNIEKHLKSHDIHKMEFKCGVCHKSWPSWRSVIMHFNKSSCRHKTPFDSSADSRGTQQSSSIVHLQSDQVEKQQATDDVIAEVATVVTSKKSSKRKQEVVQNSASNQTVDKNKTDSAPRKEKQQHKGNDDDAYPTAGSAVEASTTRKDLEETGESETTEQKKLLYCNLCAAGGWNKQVSLSQHMRRMHMEEYNAKIDVPMIKKRWTKDETLVLAELEASIPSTDGAYINQVLAQKFTSRTFEAIKSHRKRPDYRVLVQQLREQYLTLNLEGATCTEMSSNDNPIVNDGNCFVGYDDSSPKDSTPETQGRIDSEVYPDIREYVRRNIVDGKVQLSNAMNNAMLQFVNDVKCSDPVNETLKGIHDALSNRRVSDKSRGEKRNAGSKLKSLSTKRKVQKFAHYQRLFKNDKSKLAAEIFDDVDTSANKPPLSDAYEHFRKIWDKEAKDTAAVEDTVSRGTDVLLAPITREEIALAIDQTKSDTAVGPDHIPLDSIRSIARRELWCAYNIWIGSRRIPDQLKINRTSLLPKGNEGLDNIKNWRPITIASLLIRLYNKILARRMQSVFLINRKQTGFKPINGVGQNTSLIHNLLRHARINRNNLFVCLLDVSKAFDSVPHDSIKRALKRNGCPHDLISIIGDQYENINTCITYGTEKSPSIPIKRGVKQGDPMSSILFNLVIDELFEVIGDRFGYELHDVGSVNARAFADDIALISGSEIGMQQLLLATEEFLAARGLEINVKKCVAICLRKAGKAKKSQIADATVKNPPKFMVSNEPIRLLGVNEQCRYLGVHFTPLGAVDPRVPVSTLRLALASLSKAPLKPQQKVVMLRTYLIPRFIHTFTYTECYPKLMGQQDRLVRRWLKETLKLPASLSSDFFYLPTKEGGLGIGKLYDIIGTAKVRLHNMFARSGDVCLQYLVGTQGSSMHARWCQAMKLDHRPSAADIKKRKIMIIDEYRDRFSNTVHGAGSEVFKSSPITNQWLSGQTRLLKGSTYIRSIQMRTNTIPTRVSTSRGRNSVKTCRRCGLADETLMHILQTCPMTQGMRCKRHNNVCRKVAEKLRCKGFQVFSEQGLPSPGLQTNISRPDLIAKRDDKAIVLDITCVYESGKHSLQEAYRRKVDRYESLAETIRGTYQVQEVAFHGLCVGSRGSFDPRHLSIWHSIGFSGHELSVLAVGVMEDSLRTITLFNNANRLLLRE

SEQ ID NO: 1978 - protein, 1181 aa, synthetic construct
  source 1..1181: note = MG140-171 reverse transcriptase
MSQVNNADDKQGSRARRRSGNGNSTSDKEDSCDAYCVYYPFEMNSACSRCQEMLGSSMANIEQHLKSHDIVQLEYKCGVCQKPWPSWRSVITHYNKSSCRNTTPTISSGITTASDTQMDTEETDKRVATPESEQPEQQQQQQQQQQQELFYCKLCAAGGWSKAVSLSQHMRRMHAKEYNSAIEVPTVKRRWTKDETQVLAEMEASIPSDDGTYINQILSQRFPSRTFEAIKSHRKKSDYRDLVQQIRARGTGALFEGSTCTDVSSLNNPNPVVNDGNCFAENENDDSSPNDSTNIPAAVSDEEQYPDIRLYIQNSIIDGRVQVCERMRVAISAFMNNGQNSDAVNISLEGIQQAMKNRKAPNEASTEQKNNVSKRRSPKAKTRAHKFAHYQQLFKKNKSKLASEIFDSVDTSASKPPISDAFKHFQKVWETKASDTAAVDETDSRGTAVLLAPITREEIARVIEQTKNDTAVGPDEVTLESIRCIARRELWCAYNIWIGMRQIPDQLKLNRTALLPKGSEGLEQIKNWRPITIASLLIRLYNKIIAKRLQSVFATSHKQTGFKPMNGVGQNTALLHNILRHARANKNSLSVCLLDVSKAFDSVPHDSIKRALKRNGCPKGMIELIGEQYEDISTTITYGQECSPKISIYRGVKQGDPMSSILFNLVIDELFEVIGDRFGYEIPGVGCVNARAFADDIALISGSEIGMQQLLSQTEKFLSCRGLELNVKKCVAICLRKAGKVKKSQIADSSVKNPPVFTVNAEPIRLIGVNEQCKYLGIHYTPLGAVDPRESVSRLRLALTSLSKAPLKPQQKVVMLRSYLIPRFIYTFTYTECYPKLLGQQDRLIRRWLKETLKLPASLSSDFFYLPTKEGGLGIGKLYDIIGFAKVRLYNTFMRSGDACLQYLVETQGSSMHARWCQAMKLSHRPPVADINKRKIAVIDECRDRFQQTVHGGGHEAFRSSPITNQWLTGQTRIMKGSTFVRSIQMRTNTIPTRVSTSRGRNSIKTCRRCGLADETLIHILQTCPITQGMRCQRHNNVCRKVAEKLRSKGFQVFSEQGIPSPGLQTNISRPDLIATKDDRALVLDITCVFETGKHSLSEAYRRKVTRYESLVETIKEKYRIQTVDFHGLCIGSRGAIEPRHLSIWHSIGFSGTELSVLAVSVMEDSLRTITLFNNANRLRI

SEQ ID NO: 1979 - protein, 1413 aa, synthetic construct
  source 1..1413: note = MG140-172 reverse transcriptase
MRAGRCLFPPCLVDPSVVGRRLKQCNWYRITLSESVSLSWWREVCTHQIKLMATNAVISGASPMPVGEHGGTQRGSYGDFESGAAQITPQLRSEDPMKGAKFKNGPLPTTPGRLSRAARLARRRPNTDGPVGQTRMDDHLVQSGIVRVIPGGGLVDTARETEDLTDFQDNEKAVVGRKRRRTVRKDWLTDRGGAYGTGTDSTPRSGERAASVMGVNRTPDQPCSSSHTAGELSQGGSREYLSEDSQTNTAPCGSTPSVSGTATGSSTEVVHTQPATPVSEVRGGAEPSPVLLTVSPWCVSLPLNDPCCGLCGKVIGAVTAMAKHLRICHHSTQVIFECGKCGKTGGSHHSISCHVPKCKGEKERMVAGGFTCETCQNTFTTQAGLSLHRRRAHKDLYRREVLVRERARRGKNVLRRKWSATEVEGVRRLIPSVKHLKSPNLFIAEQLGSDKTGRQVSDLRRSLGSCCTSGAAEAPDWSDLVRELSIARDPTPSRFGVQLRLLEAFEKRETEGDGIQSGATPRLWMGAIPSPAWIRSSALELLEELGRGADGPRVETARRDERGATPMLTGRRAGRRAKYRLHQKMFSGKRSALAYLILDSVAKRSCPVPMSEITSVFSDRWGGKDTFSGLGQFISGESVSNEFFWSPISASEIRENIRKSKHSSAAGPDGVTQSDLVKWDPSGCRLARLFNAWLISGTLPEAFKENFSTLIPKSADPTELESISNWRPLTVGSVVLRLYSRILTLRLANACPLSPRQKGFTGSSGCSENLKLLEGLIRRSRICGVTLALVSVDFAKAFDTVTHGHILSVLELKGLDRHVLGLIRDSYVGCVTRVKVGSERSPLIDMKVGVKQGDPMSPLLFNLALDPLIQTLESRGEGYVWDGQSVTTIAFADDLVMVSGSWTGMAKNITILETFCELTGMRVQPKKCFGFLLSKGAYSYVENDCNPWLVCGESLRLTGSEVLERYLGMELGPNTAIGLSEPFLKLQGWIDRIGRAALGPSQKVEILTRYAIPRLLYQLDHGHARITLLNKLDLLIRGAVKRWLHLPPSTADGLLYSRCQDGGLGIVKLARQIPAVQARRVFRLSLSEDPLIRMATASLYPREKFERLWLSAGGLLEEVPNRGGGPIEAGNSSGVPDGSKARRPVPCNWRRESFQGWCGLSIQGQGAVVFGGDKKSNCWLGNPTECGMTEAQYVAALQLRANVFPTLEALTRGRGENPPCRRCNSLVESCSHILGQCPAVQSSRIARHDKICGLLTEEATKAGWSVINQLRIRGPAGELRIPDLIFVREDRAMVVDVTVRYEFALNTLMDADAKKVAYYKPYAAEIMRELVGVAKLRFFGFPVGARGKWPSCNDRLLSRLGLSKSRAKRFAMLVSKRTVLYSLDILRDFQRPLVKGVPDTRTRSEPEGNETCL

SEQ ID NO: 1980 - protein, 1047 aa, synthetic construct
  source 1..1047: note = MG140-173 reverse transcriptase
MRTCDGTPIAPGTSGLRKRDRTVYAARLAQLEEGEQWQCTDCHLIFLTEGSLKVHRAVKHPSAYNDELLETKRHRVTESELRRIAREELRITQGTIMDDARGLVDELFLSGVANRSIDMLRKIRARREYQEIRLNEFQALQQRLQADNTNDNGDIPAEGIPTHIGEDGNDLNQEGVLRLKAQAEVLRYILHPTAEEADSIHPDILAYANAALQGRDTWLETRDKLLPPHKPRRNRPVRVGRGPLRNHRRKNRFTARYERFKLTQELLRDDRKATLNKIFEGQELTRSEEFPDIVDVENTFVERLENNDSQDTSPTIFGEPCEPCESTSFGAFPADFVLEVHNKIDGKSAPGRDGVIKKQLTKLGKVNLAIIMNLWFWRGIPPDCKKNRTILLHKKGDRKVVDNWRPITIGDLLVRLYAKLWDTRLRKVIQIEERQQAFRPVDGCLNNVKMIQYMIKQSRKNKKELNIVFLDLSKAFDKVLHTSIHKALLRKGVATDVIDTILTDLYGGASTEVTIRSNKSTRPINIRNGVKQGCTLSPFLFNLVIDELMTRLRESKLGVSVGEELVAGMAFADDLSLAATSAEDMVELLKICEEFFDSKALEVNATKCSSLRLVPATNSKRMKVITTVHRWWKNTGIPCVTFEDMDKYLGVKITPLGEVLINVQEWKRRLENLRKAALKPFQRADAIRDLLVPRLIHLLRLSDAQKSVIKRVFGPIKTAYKRCLHLPDWTSDSWLHHPKGGRLPNLLLTIARSRVRSTVKMAKSSDRAIVTMGLGLEVKAQKLKRLVGFDGIEDSKWEETEELNRRLKLKGELNGEARLTMLKSSHGRGWWLWSGNMKGSYMVNTLRMLSGTLPTKINTTRGRPDLSKLCRRCHATAETDIHVLQICPANQSLIKRRHDIIVRRIGADLRDKGWTVAIERVFMIASGRRHPDLWMYKDNVAILADVQIPYEKDEATLKDRLNKKQLKYDELLNECGFPDTATERKVLGLIIGAAGTMIPETETPFRELQLKSKLNTYCRLAAEGSSKIWFQHTGNWTPEVLAEHAGT

SEQ ID NO: 1981 - protein, 1040 aa, synthetic construct
  source 1..1040: note = MG140-174 reverse transcriptase
MFGSSARNERSTDALVPTRAALLGNTAGPTVGPPEPPPPHTPPNICLECQALGVVKVFGTKSGLSQHRRKAHKAIYMAERLESDPPIKERWTDEEIRLLALDEAKWVSEGCLGKFVNKHLAGLHPNRSCNAITAARKLKRYKDALKVVTDEGSLPQPARIPAEEQEPAPSTWSLALKATFLSVVLGSVDLSEVLPGQPSNLSQTAVDEDFAGWLPVAPPKVFKHSPQAELPENSRKRRRALYARTQQLWRKSRKRSVDTVLTGAWAIEAPSIDRTAFIGFWGDLLRTGSKADHRPVTPIREVAWSVLDPITPGEIIETLKGMKGGTAPGPDNRVLRSVRQMEPAALAGRFNFWMYSGCTPSPLYEGYTSFIPKVPGNVEPANFRPITVSSIITRCFHCILARRLEALCPPSLRQKAFRSGDGICENIEVFKETIRHAQHPKHPRDLFLTFLDVRKAFDSVSHESMAKAAERAGVPPPLVIYIQNLYRKASTSLRLGSSLSDPIRVGQGVRQGDPLSPILFNFVIDWALAELDPHLGFDLDGIKLNHLAFADDVVLLSKTQAGLQRQIDLFSSHLAGSGLILNAAKCSSMGIKVVGGRERHTWVVDHRGFAKVGGTGIAAMEVGEAYKYLGIQITNNGAHSKAKEKLTKNMAELTHAPLKPQQRLWILNTCVIPALYHDLVLSECTQGFLESLDRDVRAAVRTWTRLPKDTVIPYFYTDSKAGGLGIPSIRWTVPQLKVNRLSRLVESQDPVVRKVAGLANFQAKIRKWSKASLLEGEPMTSSLIRKNVWSRRLYATVDGRGLEQSSLVPGVHDWVKDGSLLLSGAKFNAALALRGGTLPTRVRASRGRGVGVPDCDHCGVGHKESLGHILQTCGRTHGARIKRHDRVLAETSKALSKLGYTTLIEPHIQTESGLRKPDIVAYNVARGISAVIDVTICTDNIEVNRAHFKKVETYAQHPEITRYVEALSGGREPFYSGVAINWRGAIAPQSAQDLRTMGVSERTLKLLSVITVEQSALIHRLFNTNTARRIPDQNPFFDPP

SEQ ID NO: 1982 - protein, 1089 aa, synthetic construct
  source 1..1089: note = MG140-175 reverse transcriptase
MEREILASGRSQSSKGGIVQLLENSRIVERTGNAIAKARQRADYKAMLASGQVRGGQSGSSFGPTGVSNDPPVPGRDANDSDSGSDFDMDVDTEPIVNSVVENMSGGIERGSSSGSDFDYGGLAELQGRRSEASYEGPQSIPRVLLEENSGEQVFLAENSSENLEGTRSILGGGIDSLSQVSKSLFYHLRSDLLGLDRELLAAQLSADPESVVREHFESFTAKYPVERWKPKLAPVRVIPTGVKRRRRFLYRQIQRSYTKRRSDCCREVVTGDWEKGNQSAALELADVEPFWREIFEAESVPDPRTPEPIREEVLAVVAPISIDEVKTAIKQCSSKTAPGVDGFRLQHLRAVPAAELAAVYNLWLLAGRLPAALDEARTTLIPKERGTVDPAKFRPITVTSILTRLFHRILASRIERCCPINQRQKAFRKIDGMSENVLLLRFLLAKATDARRPRPLYLCFLDVRKAFDSVSFESLFLALRRVGVPEHLINYFRSVYNARFTRVYSGANKSAPIRPKKGVSQGDPTSGILFNMLIDWVLTELDPTIGFPLADSLTELNDLLTYLAFADDLLLAAQSVFDLRRQVDLCVEALRKCGLEVNASKCRVLAIKVDGHTRQWACDESAEVFIGGNRVPTTKISDLLAESRYKYLGIQFGVRGTFLNVENRLLSEIDHTRRAPLRPEQRMFILRQNILPALNHQLVLARCSMSALKKLDRRIRVAVRTWLHLPHDTPLAYFYANPKDGGLGLRCLAYGVPALKRKRLATLTASEDPLVKNMVASSWFTKLTNKWSSPVVMTVTPLDSNGEGGDTLPFTMNLSKAESDYGWQTALYRGCWDGFGLRETAGSWKTQRWVTSGGGLITGKRFIGAIALRGGLLPCKARSTRGRQRANLPKHCDCCGPGWQETLQHILQVCPRTHDPRSKRHNEICKLLVHQLRRKGWEVVVEPRIPYSGTWAKPDIIAARLDPESGVKAFCLDVTVCSDQYGAANLAHLGKIAKYSEIGGGVPVVSNWVRSWAAETFGPTYGCEPRYTACAISWRGIFSRLSYESLSKELKLSAADLTLLTVRTLEWGAWIHRFFSRSTARVRRRIRR

SEQ ID NO: 1983 - protein, 1093 aa, synthetic construct
  source 1..1093: note = MG140-176 reverse transcriptase
MTSNDLSRSLLSTGSQVLHQSGPASSRQGVSSDGGNTLADKSSDLSTNPLGEPDATSSSSSSMDVRNQDIEAHRRIDPAPTTTSSETTPSFTAPGKSPTCPTCSRTFASFGGRRVHESRAHKGTFHTEAKQIAATKTRLRWSYEEHLLLAKAEASYTGPVEEQPDVAAKYDHLHGLFPERSREAIKNQCLKNKAYQEILRKVLDQNNTSSGEEEEIPIDSPSGEELHSEEGIEDTTSVDDLTPTGQQWQEVLRDSISKESKKTAAHTCVGNRKRTDRQFTKWLKRHMSEMPKKPAPKPSPPISGNRASRRRKMRAAWMKAYDRNPGRTAKLVLDGHQLDRSVEYPEGTTKFWKELYETDSVKWSGREEATLQESTKHQALLRPFTIDEVTAHIKSMRAGATGVDKISLRDIRKMPVDELAEWFNLFLLQGALPRVLKRFRTTLIPKKKNPTRPSEFRPISVGSFVRRLFTGMLARRMNIVETHHCQRGFKKMEGCALQSYTLRAIVDGHIKKPNDLHYAYMDVRKAFDSVSHDTLRKAYVRSHLPAGFIHLLEDMYVGNTTILSADPQRNIVRLRRGVLQGDPLSPTLFNLVMDDVASGLDRDIGAELGSAKVNCLMFADDSVLLANTLQGLQHNVNLYVERMAAYGLELNASKCAAVHIKADRQHKRWYIDPTLSLLAGQEKVPSLTIGQSYRYLGLTTNVNKGLLSAHEQLKSMLGRLSASVLKPQQRLAILKTNVIPGILFETTLEHRTDVALKDLDIRVRKEVRRWLHLPKDVPTSTFHTGVREGGLGIPSLRTRVPRLQMDRFKRLMETPDPDEWILALLGSPYWRKANTDAAASLARAGVQDKVTEQDHWSKRLYASVDGSGMLNHSNRSGYSSQWIDPTFLQMSGREFVGAMHVRCNSLVTRERATRGRISSKGRNCPCCPDKRESLAHILQVCWRTQNHRIFRHNSIMTMIVNKLRKLQFSVVVEPRIPHGKTFLKPDIVAVKDGTVHILDPSIVACSRNLVLAEADKMTKYQVTDVKRWARNKYGMNKVVVAGLIMDWRGAWAPRSVQHLKYLGFKVGNIELMSFKILKLSRWIYQCVRDRTDA

SEQ ID NO: 1984 - protein, 1060 aa, synthetic construct
  source 1..1060: note = MG140-177 reverse transcriptase
MERGIEEKQSSEAAKRSTQSRQDWDMIARTEVDLVVNRGKYPPELPEDLSDALIAINQQAEVEHQEPLWKDKAYNTLRTKRSKQEWRDKLMALGLAKTATLAQGLSAKVAAQLQAEAETSQADEILQLGEEDEVASQSSSGSDFIMSDVEVEEEPASSPARPVVVEAIVEAEPDNPSPGEITWHSHVVPKLTSLGFTEEELRNLSPGVETTENQRIVDEQFLIFSQKYPARPLEPVKRKTMVLPRNRKKRRAVQYRLIQRAYIRDRARAAKTVLSGDWKAESEDGAATLEAQESFWRPLLERESIADSRSPDPIREEQWGLIAAIELEDLEMALKASPGKTAAGPDGRTLGQIAKMDRVAVLRQMNLWLVSCCLPSALCEARTTLIPKVLGTTEPSKFRPITVASLLVRLYHRIIAQRLEKLCPCSERQKAFRTGDGIAENVFLVEQLIRDATQRAVPREVYLCFLDVAKAFDSVSHESLLAACRRAGVASPLLSYIGNVYRRSATRLWVNGAKTEPIACKQGVRQGDPLSSMLFNFVIDWALSSLDPQLGADVGKVRVSHAAYADDQVVASGTKTGLQANVNTLVSELGKSGLSLNAAKCMTVALVVDRGRKKSLVDSQSFITIDGKQVPGQKASEYYKYLGLNISKKGSSTTILERVKKQLQELSKAPLKPQQRLYILKANVIPGLTHQLVLGRVYKGFLKHLDCEIRKWVRKWLKFPHDIHLANFYAKVKDGGLGIKSLEFTIPLLKRRRMVRAKCSSDPAIVEATRTMDFEKSYGYWIKPLRTLVPGFPMDDSRSQDMAWGSVLTQSVDGKGLSFAVKCPSVQDWVSDGTSLMEGRKYCAALNLRAGTLPSGERMDRGRNTGRAKCSFPPCGGIEFLGHILQCCDKTYEARIWRHNRLMGKIIKSLKRLKYDYLKEPRIPVVENGVRTTRKPDIVFWSERKGLSVVLDVSVHRDNLETANTGHEAKVAYYDRAEVREWVKRKTKVEPEFSAFAVSWRGIVNPQSAEDLKKYGWSKFHIKLLAVETVESGCYIHRLFQSETTQTRRRRVQRQVNSIP

SEQ ID NO: 1985 - protein, 1142 aa, synthetic construct
  source 1..1142: note = MG140-178 reverse transcriptase
MWSPEDDHALAREAVAVHVSLRENGLGGIVGEGKISPRDLAKAIFRRNAHGDGLFPGRSEEALRKRMETVQRYQVLVAKLLSELEARPERSNPGDEERIRSNSSLSVQPEPVEESDLRQGSPPTTHLGPPEGQGAMTDLFVSVESLGPDYEADHDPPAGESLHHTTHVETVSGLGSSEVGVDPGPGIQPGAQEPPPPGPYSALLESLRPEEGSQDTIDLTGLEPGVACPQNRSIVESQYQLFSQVCPSKAPTVKRGVPRPITRQSGLPRRKLRRMRYFELQRAWSKNPAQTAKKVLDGTWGSEQAPIPMEEISAFWKPIFEAPSKPDNRTVEPIRPAKEDCMEPVSLAEVESALKGSKQDAAAGPDGRNLADLKKAPAKQLLARMFNLWLTTACIPMELTESRTVLIPKEMGTRDPAKHRPITVSSVLIRVFHKILAARLDTHCPPSDRQKAFRSGDGLFENVAILKSVLHSARGGDIMDQGSGKVKRGKTKDVALIFLDVRKAFDSVSHQSLLLAARRAGVPEGLLAYIQTVYRTSTLKIHAGGEVSENIRPAQGVKQGDPLSCFLFNSCIDWAISELDQLGTEGIGFDMGTYLLNHLAFADDLCLLAASPQGLRVLVKSVETQLAAMGLYLNAGKCATMQVIKDGRNGKTHVGTQSIVSLSSREGETIPVTALGIGDTYKYLGITFRPKGTYTAVKEKVLKKITAVNSVPLKPQQRLHILKTNIVPAVWHELVMAEVFATDLRQLDRVVRAAVRGWLHLPKDTPIPFYHADLRDGGLGIPNIEQKSQSLRLSRLLRLMASSDPAVQAAWSTGVIPAEIQRYSKRLCPSSDTIGLRDLDKHIQSANTARELHDNRVDTAGLRCASNAVLGTWRRPVGHRWLSCPAADKIKGSMFCQMVALRAGVLETGVRRDRRLPPPDQWNVATMGQRPSPRCEACAPALQPSQAHHVDGNMYLDTLNHRLQKCAKTHGYTVYRHNRLVEVLEGFLTGRGAVVKHEPGASGDIKDPGGREWKPDMFVTMPEGTGGSLVKEVWCIDPTVTTDGHKNMDTPHFEKVNYYSSVPCVEEAMKSFSGAELTRFSALAISWRGIIAPTSLRDMSSLGLSKTQIEILCQIVVEQGVRIYRAWSKTTHRRGISFEGRA

SEQ ID NO: 1986 - protein, 1184 aa, synthetic construct
  source 1..1184: note = MG140-179 reverse transcriptase
MLRGLTSHFALISHVPNHRNENKTGRKDQFGSGPTGNPSDGETGIGRRPRVNAASGNSGGGLETDAPTASSAPSPAEHFCGFPGCGRSFATANGRGQHERRGHREWKDQQNSQLAPSQGSSRGSQWTYAEDVVLARAELAWEVLPHPPRQVNQHLVAANPALTQFGRTAEAVKKRRQNQQYKNLLRELRETGPDVLAPGQLESAAGGDSDTPDDVGLMGDRVEPAAASMTQNNQEVSRYENWRTRMIASIKDSPLAELFTERSLEEFGLEGEVRMHRHQEYVRTLYLAWVEENLKAYAEDPYDPTLLGKQRRRKGVKSSNRAIKPTPTETNGEPPRQGAKPRDKGSRSRRHRRRNGVSDRRSARTRVRDEARFRAQKAFRQNPHEASKDLIKGKFAVPITTDVGETRASDGPGTEGPPSPEELKAYWGGLFQTESTENTHRIAAGETIWELCDPFGTAEVAKHLKRANETTPGPDGLTLDFLKWGCKLAELTGWFNVFLLVGIPADLLSGTVTLVPKVARPTACKDYRPITVTSRVLRAFHSLLTGRFQEKLALPHEQRGFRKLDGCRDNIWCLQELIRTSTANGTKELSIAFLDVKNAFGSVSHQAIFQACLRKGVPSPVMSHIKRVYQNTSVTFKGDSAKQQFHVRSGVLQGDPLSAELFIHVMDFATSLSIHPTIGVGGDGEGEDAGRVCSYLAYADDMALVARKAVELSLQVGDLEKAMSSLGMLLNAGKCGTVRIACDSHRKRTWTDSNSFLEVNGDLVPALGLKDTYRYLGLQFSPTGITCTVSKQLGDGLKNISSAPVDPQQRLFALREVLIPQLAHQLVLGVATGKTLKEFDRSIRQKVRAWTHLPHDTPLGVFHSKVRDGGLGIPCLATEVIRWRADRLKRLYLQTSHPLIGWLLKRPDVAKRLERLTAGVRPPGWDHILSSRQDSIDYWKHRLVQSVDNRGLKYASLSKGSYDWVRAPTGLFRGGEFVKALAVRHATLKTRLRASRGRARESQSVRCHLCKDQLHSLSHLSQVCGRTHGQRIARHDSVVTVLEKACLRKGLRVIREPIIRTGPTLKDALKPDLIILKKNDAWVIDPTIVSDSADLRKQDEAKRMKYSSPRVKEYLRGIVEHPEQSTSLTVRGLPFSWRGVVLWDAWREIESSLGLPRAVLDLCLLKVLVGTWKLWYFETRLRTR

SEQ ID NO: 1987 - protein, 1112 aa, synthetic construct
  source 1..1112: note = MG140-180 reverse transcriptase
MEERVWRKCQGNSRPSTGNFKGETLGSPARGSSANSTRARSVGETPLTLWLKKPKVGSAAASENNTDAVALAPCVTGDGAPDHSDSSEEVNTPKDSSVCDICRQRFNGARGVSVHTRRMHPTESHARAQRQSDGRKKPWNDEERYTVAVEEARLVKAGVERRRLNGMLAEKFSDRTECSLKCERRQARFQAILSTVTKELNESRPRVYTVEEDSTVPNDNSVVPEWRLTLAHALQKKRTSAYLCTTSSLLNREFKRWMRNFPVRRQGARRKVQQRPPAKKGNRNARRRRLRAAWLDAYEKNQTRTSKRVIQGANLGEEEEYPEGMTEFWSEIFEKPSRPTGRAERDPWGKEESPLLRPFTGGEVKFHLRSMKSGAPGVDGVTLQHLKAVDPYCLAEWFNCFLLLGMVPRVLKQFKTIFIAKCEDPSSPTQYRPITIGSYVRRLFAGILAKRLNKSNTGGVSCQRGFKEVEGCAINQEILRAVVDGHIGARKSLNYVFLDVAKAFDSVAHSRLDGAFRKASLPKGLGDLFAEMYRGNTTTFSGGTRVIRIKKGVLQGDPLSPVIFNLVMDVAVRCLKESVGAALEGSKVSALLFADDAVLLSESVSGLQMNVDRFVSKLASFGLGINAAKSAAVHIGVNGKKKSWFVRDTSSIVIQGEKVKALKVGESYKYLGLKLSLGKCVSNTVKDLDVMLQNITRSVLKPQHKLAILRSHAIPKVEYALDLGESSKGILRDCDRHIRRAVRKWVHLPKDVPISLFHVNIKDGGLGIPSLRTKIPRLRKQRWIRINSTENPDPQLAGLLASPYWRMKEESQELAAVAGDSQGDTTYNLKMKEREYWRDALYSTTDGEGLRSHSSGSSYNSKFFDDNFLRLTGKEFVKALHLRCGSLRTPARSNRGRVEGRGPMCPSCPDKVASIGHLLQCCGRTHLQRVGRHDTIVKELARKLRTLGYETVLEPHIPVGQSHEKPDIVAYRKEDQKLLVLDPTIVNCKCCLDTLAAEKSAKYSNTAVFEWLVAKYGACGRRENVTVEGIVLNFRGAWSPRSAQTLLDSGVRPGYLEVLSFRVLKLGNFIYDSLWDRPDWGRSWRDRLARRKKAPSRGGVAHRGRGQRALTR

SEQ ID NO: 1988 - protein, 1206 aa, synthetic construct
  source 1..1206: note = MG140-181 reverse transcriptase
MNVKPRAGRVLALNNYPSPRQWVNAPLSLYISRIPNDKLQNTPRIDGAGVGSSPRNGKRPRRELEEPGGRGGCPPSGGECTSRPLTVLTAPVELHSCPYPGCDKAFKTKRGLGQHERHIHREERDSQMAQSLPANRAGQRWTQAERVVLVREEQRLYRENPNIQPGVMNDSLSLFSTSTGFRSVEAIKKARKTAAWIACVEEERTKNSEHLARQCPIPADLTEARVLDVAGSPSESDPNAAPSLSRRSSESAGPSDAPPDEFAKMMRQVRLELLSSFSSERGPRVTPVDDCLTLIRANLDPALLGESLQEAIRASFDAWTATLRQGETVYGRSARTSQKPEKRAQTLEQETGVHGSELPAKQKPKSERRRKRVRRSKRSAKRAGLRRQHKSSFESNPFLAAKQILNSTGSFQAEGGDQAPSGMPIEPLEAYWGEVFSAQSGEDSDNRVSPMSLLGTEQAETRWSLCRPVLAEELEQGFRDANTKSVPGPDNLTWKALRAAPRQDLLDWMNLFLLAERPASSLLQAVVTLVPKVQIPQEPGDYRPIAVASALLRIFHSIIARRWDVELQLPSEQRGFRQCVDGTFENVFILRNLIKSAKRSVRKIALCFCDIKNAFGAVSHKAVLIACQRMGVPAPMVSYVENVYKDFCIKFKGGSGRLFSVNRGVLQGDPLSSVVFNCVMALVMSSQRRQFGVGRTGNSREVNNDARITTYASYADDTILMAETRLEMQSNFAELQAALEKVGLRLNAKKCATFELDKAGKQKKTFVRSEPFLKVEKVNVPALGERDFYKYLGIKFSPEGTTGFVTPVSLQRDLARVGAARIDPQDRLFVIRSVLIPRMHHSLVLGQAHGKALRELDRFIRKAVREWLHVPHDTPLGFFHAKARDGGLGIPNLATEVPRLRADRLRRIVESPTPLIKWLMGDEAIAASVSKDCDAERLISRLGDFSTKEASRDSWRNLLVNSSIDGRGLAIARNCPQSSEWLTHPNCGISGKEFVKAVHMRGNLLRTPARAGRGGRASTSCFHCRGTTCGLGHILQRCPTSHGCRVARHDSVVGLIAASIRRSAKFQVVEGPIISKEAKELTKPEKDALIPDLVIYNRGEITIIDPTIVSDHSTMRDLETAANHKVVKYNSEVVRSWAREKFAKGRELKSFKVIGLPITWRGLWRRDDFGAIIERLRLPANLRVLLAIRTLVFGWRIWSSFSQKRT

SEQ ID NO: 1989 - protein, 1144 aa, synthetic construct
  source 1..1144: note = MG140-182 reverse transcriptase
MNKNTREDREAAESFGTAVDRGTDGAAGTSSGVVPDAFGGGSPPDPPLGFLRCPDCNGIYKGKGGLGVHRQRAHRAKYEEEKGARAPRHHVWRDEERRLLAREELRLLALVPPPKNINQALQASFPDWSIESIKGQRNKSKAYSDIFDEFKREGERSGNGTTEVQRPGGAVGRPAQDPDAHALEETNPDTDLPTQQGDPMDHVALRGGGPDRDDPDSVPANQSLERPLETEAGDIPAADVPGPIENVESERQNSEQDHMAQLSWAFKGFFELHREDLGGIFNGEVFVDDRVQIERWISEKVEHVFGITVDASTPPKGKGKARRPPPETETRRQRKARLRQLTLEFYERDPNACGKAILADTIDTRDTVPEERKEAFWTDVFEKETAYSGNIPEPLEREYNWRLSHPITKSELDSALEKMTESASGLDGVTLADIRSCQLHTFVLILNVMWRTNVIPKWLSDGRVTLIPKVAQPQSPKDFRPITVSSMLLRVFHRILARRLDTLVIDEAQVAYRQVDGCQTNLFILSSILRDSHQNREPLFAIFVDVAKAFDSVSRGAILAAAKRKGLPPPFLSYLENIFNQSGVWVGKRYCKQNNGVRQGDPMSGALFNFVMDYVYSQLSEDVGYPLREHHPDGSKSLIALIRHLLFADDGVIFANSLQGLDHQVQRVVRAFAECGMKLNPSKSMVLGKVPAGGGDKAMITAPESQAQLLIDGEKVPVMTTEGSYKYLGLLVGPRGFLTGYPESLLDTKLDRLQKSALKPQQKLQVLRRQVICSIMYAVTLGEVSHGRMLAIDKSVRKFVRKICHLPHDTPNSALHADMKAGGLGVTSLALTVPINRARRLARLFAKPGPIVQHLKEVSHCIKKFDEGQRIFSHNGVQILTKKDAVEGLGEELHKKVDGFGLKPHARCRQFDQWLYDCKMSIKGREFVLAVKTRLGCLNTPSRALRGGRGRTLDDKLCWRDRQPATLNHISQYCDSTHGLRVERHDQVVKMIHSSLSSRGNKTLREPRLAIENDRVLIPDIVTIDKERKAVSILDPIICSDFKNLEEVSNIKREKYNCEPLKKSACDRILGEERPAGLKVHVSGLAFNCRGAVAPSTHSILRTLCSRRYCAYIILRILVWTAQIVSQYRRTVHVSRRRGEARRS

SEQ ID NO: 1990 - protein, 1084 aa, synthetic construct
  source 1..1084: note = MG140-183 reverse transcriptase
MPSRWVTISNQTGLPTQGGGNLLGGTSSNERLEAPAFSSIEQPMSSERPQASQQPSVVLVGKCELPCNICGRGPFRGKAGLAQHKRKAHAEEYHLAHAVEIAPEVIETAPAGPSGTSAPVRSSGKLWCDEDRIILAKAYLEAEARSEKVGPKALMGCLRNRTYDAIKGQLKDPRFKELLELSRTHEGVRPLANAISGGSDDNNSPVQDLSQACDQSEQYLTRLRETLESSPLHKIDLLAPNMLPSITSQGLVDNDLEEWLPAGTSQGKRAKGTTKLPKNARKRRRVLYKRVQTTWKYNRKRCAEEVISGAWEREESQVSMDQLLKYWEPLLTTESRIDNRRVDPIREEQWGAMVPFTIQEVNDSLKGMKASTAPGPDQKLVSDLKALPLEQLRYRFNLWLYLGVVPMRLCEGYTSLIPKIAGTDKPNEFRPITVSSVLIRLYHKTLSRRLERLCPPSVRQKAFRSGDGIAENLCILQALLKKAQDPRVPRDLALAFLDVRKAFDSVAHGSLLKAAERAGVPKPVTEYIGRFYSNSTTRLRFRGGLSHVISVKQGVKQGDPLSCILFNLVIDWALDQLSEHIKFDVGNSVGFNHAAFADDVILAANRKDGLQAQVNLFTDHLQKSGMTVNAGKCATIAIVVNGKSRKWVVDPRRFLKIGDSPELVKALSVADTYKYLGIQASASGSTSCAEGKLERLLRQISRAPLKPQQRLWILNTRVFPSLRHDLVFCRTGKGFLRHLDRKVKTAVKGWLKLPKDTSDPSFWASVSDGGLGILSLEHCVPEWKRSRLTCMQFATTDPIMIELLAGNWLRKEIRMWSKPVTWRAHVMNCAETRSEAYRTELYRTIDGRGLKSASLVPAAHQWVSNGSSLLKGSYFNAAIGIRLGTLPTKLRASRGRSEVDTGCKCNYSWRGRYVAPTVWHSECLSHILQKCALTHGNTIRRHNRVLEALAGIFRRRGFQTTLEPVFKIAGGAHLKPDLLVWGDGRPSMVIDVSICRDDCADPNEPHYAKVQKYGEHAQIKEQVMLMTQVVPVFSALVINWRGCIAPASAIDLKSAGFSDSDLILLAALTVEHGAEIHNVYRKIV

SEQ ID NO: 1991 - protein, 1063 aa, synthetic construct
  source 1..1063: note = MG140-184 reverse transcriptase
VGNHIFLSGVTARAGLRSLVPTTNLINSNLCSDLAATAAGARDVGGNLLCGWENVDGSECEFVGKSKSGLSQHRRSRHAERYHNEIANDIAARGSSKTLWSTEESSLLISNIRRMRRENGGVELSRKRVGELIIEAHLTTRTLGSILGELRKGPYQAALTGGDLVDMVVAPAPSVQSQVVPEEQWNSRIAREEALGNLRELITGLPEGADLQAITPGQSCEANQLVADLHYRAFDELYRIKTKEPRGGGGRTARINPKGVGKSCRRRRAQFARIQRWFKRNRGRCADAVLSGTWSADTPDIPMRDQETFWRGIFEKPSNADARTPVPVRQEQLEVIRPISCNDVKLACAAISADTAPGPDGRRKSDVLGIPTAEMANLFNIWMYLGCQPSGLHLGYTTLVPKVAGTDQPAKHRPITVQSILVRIFHRVLAGRLETACPVDERQKGFRPGDGLAQNLKILESILQEAQDVRKPRNLFLCFLDVRKAFDSVSHESLILACRRAGVPEPLVCYIESIYREAKIALRVGGQLSEIIRVLQGVKQGDPLSSVLFNLVIDWAVAGLDRNIAASLCKQQISYLAFADDMVLFSKTREGLQRQAEHFVSGLAASGLSLNAAKCRTMAIVVQGKQRKWVCDPAAFLRIDGEEVPGNSITETYKYLGLEFNPREANSSALAKLVERTRQLSKAPLKPQQRLWILKEKLLPSLLHDLVLSKCTYGLLADLDRRVRLNVRSWLRLPRDAPLPFFYADVRDGGLGIMNLRFAIPPLRAQRLRGMLSCADQVVKAVVSTATFKNQLSKWSRQGVFNGYYMSSKALCRTAFRESLVASADGRGSRHANLAPGPQRWIDSGRLLLTGARYIAAVGVRANTLPTKARCGRGRPDAIRHCGACGPDVLETLGHILQICPRTHGARINRHDIILRLLAKRLEKLGWQVKVELRITTSAGLRKPDLLAFKHGCQAWVIDVGVSAVSVGSLDEPYDQKVVKYSTLPEVSEVVVAEVGVAPLFSGFILSWRGDYSPKTMRDAHEWGLSMVDLEFLAAICVEQSAVIHRVHQTSTLVRRGRRGPGL

SEQ ID NO: 1992 - protein, 1110 aa, synthetic construct
  source 1..1110: note = MG140-185 reverse transcriptase
MCPIFEKNPNSCPSGGILYKGVRGLNVHYSRAHKAEHHAGLEAKASQSAPSRKWSDEEVKLLAHAEFIWRCEHPAESVDMAQKLIDLEKTERSYAAVRKIRTAPKYKEFYATLGAPPGVPKGKSVSQIVGQFDEESLEDDPLNTAFAVGLDCTGTRSEPASQNSPTARSNSSPLPPNVNMTPTQTAQPRANGNPFVDSDSDEDGDRMFRTPPPSPIAANPSAVSPPVDLAVVPPVVSQSDCWADSVRAALVSLETSIDLASIVPSGGEVNQASVDSDYSIWLPPRPQNPSGRLRTPPRKLPTNKRSRRKALYSRLQRMYKRNRAAAADTVLDGSWEKDGSSVPLDVQDRYWRNLLETPSRPDSRNPEPIREVQWELLSPISQFEVKCALKQMKRKTSPGLDGLTVSRLKSLPIDRVVGRFNLWLLAGCIPSSLREGYTALIPKEFETADPAKFRPITVSSTLIRLYHKVLAARFEQLCPTSVRQKAFKAVDGCGENTAVLQSLLKHATDPGAPKELYVAFLDVRKAFDSVSHESLVLAARRAGIPEPLLSYVVNFYASSSTRLRVDGKLGDLIRVMQGVRQGDPLSCWLFNIVIDWSLTALNPAVGVSLQSEVLSHLAFADDLCLPASTREGLQTQIDAVSAHLRDSGLNLNAAKCATISVCVTPGRTKTWYCSKARQFTVAGESIPSLDVSESYRYLGLQIRATGTDANTQEVLGSMLRSVTAAPLKPQQRLWILRNKLLPKLQYALVLGEASLTVLRHVDCTVRAAVRKWLKLPNDTPKSAFYADVRDGGLGVQSFEHVIPSLKVRRFCNISSSSDPVVREVCRFPWFRREIAKWRKPTTLGGLLTTSTALRRQAFAHNLLSKVDGAGLRDAPLVQGQHSWLVSGNSMMSGAKFCAAVGLRLGTLPTRARGTRGRPEKSGWCDCCGPGHVEQLTHVLQVCPRTHGPRIARHDRVLSEVAKVFSRLGYQCTVEPHLRTPVGLRKPDLVVYGEGKPCVVLDVAITKCNLLTPDQRHIDKQRYYAQPDNPANSISTQVEALTGQAPVIYSSCVLNWRGLFSPASAADLRSFGFTERDIGFIAALVVEQGAVIHRVFNTSTHVVHHARGLRT

SEQ ID NO: 1993 - protein, 1048 aa, synthetic construct
  source 1..1048: note = MG140-186 reverse transcriptase
MADKPKQSAGLCLERGYWVDTPLVRLKSVSTQNIYEKGETVIPTVDPTEASVEGSDPYSMGLTCPNCSMVFKSQRGLSVHERRMHPVQYHSERIPRQRVKARWSTEEKYLLAKTEVALERQNLRFMNQELAKRFPARSVESIKCQRKQAAYKQLLEDVRAQQSSQPIHDRQEPGEPEEGGEDFAEGEQPWFVHLLESLQGVSFATPLSLDSIVPGKPDGNTRRLIDEEYESWAKKYPAKRIRGNTNPNVPRRSPRNRREAKRMRYAALQRAYTKNRGDCWKSVKTGDWAKEKSTLPLNDFDPPWRKIMEEASLPDGRDVDRVSEPIWALITPVTGDMVKACIKNMPKTSPGLDGIELSTIRSIPAEELAAHYNLWLYAAYQPKALREGRTVFIPKKVGTSDPLCHRPINVSSFVVRLFHRILAGRLVDHLPFNERQKGGMRGDGVAENIWTLSALLQRAKSDLTSLCVAFLDVRKAFDSVSHETILLAAKRLGVPLPLLTYLRELYTDSYTVFQANGQIGDPVRTNRGVKQGDPLSSYLFCAVIDWALASLDNSRDIGVCLGDTSLNCLAYADDVVLVSSTPAGLQQLVDTFAGHLALGGLVLSTGPDGKSKTIRIDVDGKAKRSIINPHSFLKVSGESLPALDAAQTYEYLGVNMSAHGVTTNVKKVLDAQLTCLSQAPLKPEQRMYFLVHHLLPGLYYQLVLSKVTLGYMDWMDKSVRAAVRKWIKLPKDTPVAFFHAKECDGGLGIPNLKLNTILAKRDRMGRMFRAQDPVLKEVTQMRSFRADYNKWHREAKVGDIHISSRVNLNEAWRDALYKSVDGRGLASAVSVPYAGQWITDGAALSRGRQYIGAIHIRGNLMPTATRRARGRPEVDIQCESCRKPESLGHVLQQCPRTWSSRIRRHDDIVALLAKQARKKQYTVLEEPVIPTSAGIRKPDLVLVKDSAALIIDATICADNADLNAVHSRKVDYYNKPEIVSWVRSSTGVETVKFSAAALNWRGIFSPMSYAHLKRELGLSTSVLNLVSVMCLERGYRIWRHFVQSTERF

SEQ ID NO: 1994 - protein, 1045 aa, synthetic construct
  source 1..1045: note = MG140-187 reverse transcriptase
MDNTQRNEIGANLDPQTRLAHSEIESFVCRDRNEPSGPECGRSFPTKIGLSQHRRRAHQAQYMRDCEQRLASQPVNAKITQREIEQLAKTEVELDRMRGSGSTISNDRAKALVESGKTNRTYNSIRSLRQKPAFKAAVTQFSQNQPEIPPTPVLNDTEDEQVPTEHNFRGEWERTMLLELQVGIDEGCLAQTDIDVLIPGEYNEQNVAIVNRMFDNFVAKYPATTRPRPRPNPTPRLPTQARKRKRALYRITQRLWRRNRARCAKQVVSGDWDKVGRPTVELRTLEEFWRPLLETESKEDDRNPPRKPKDESWGIAQPISKSDVEESLKSADINTAPGPDGMKLSDVKKIPTVELQAQFNVWLYTGTLPSKLCEGRTTLIQKVAGTNEPRMFRPITVTGLLGRIYDRIIARRMESCCPVNERQKGFRPLDGCAHNTYLLRGVIAAATDSSCPSSLYLAFLDVKKAFDSVSHHSLLKACKRIGMPEPIIEYVRGLYERGSTRLNCGSGEHSEPIRCKQGVKQGQPSSSCLFNFVIDWIMESCDSSIGFRIAEQLISYLAYCDDLVLLATTQDDLQRQVELVTTAMGKVGLSVNPAKCATMALVADRGRKLWFLSTEKLVKIENDWFPVLQTEDSYKYLGLAFNQHGASQSIEKKLMAQLDQITRAPLKPQQRLWILQNNVVPATYHQLVLAGVTKGALDYFDRVLRQKLKQWLKLPHTTPNSFFYADCKDGGLGLKCLRWIIPEMKARRMIKIQRSADPVMAGLALTDWFQKEMAKWDLNARSLNDGTPMTEKWNRDMAFRLELFSTADCYGLEYAHQVPYVHRWATDGNLGMSGHRYCAAIALRSGVLYSRARSARGRPEANSSCDCCGPNVVEHLGHILQVCSRTYGARIKRHDLLVMKIKKMLEYHNWTVLVEPKIRTPNSETLFVKPDLLAWKEERSVVLDVAVCSDDLAPDIAHEQKVHKYSNVPQIAQYFREMGKEPPYFSAFAVNWRGVVSPKSAADLRSFGVRKCDIRLLSVATVEQGTVMHRLFQQSTARSSGWRVG

SEQ ID NO: 1995 - protein, 1163 aa, synthetic construct
  source 1..1163: note = MG140-188 reverse transcriptase
MGLAHPCLLKCPATTSQNPKGCSKELASASSNGSQLNQSSELSGRSPRSRTPVLLLCPVENCPKAGAEFKGERGLNQHLRRAHPVLYHAEQSRLEADSVIRRLPVSSEESRLLASREQQYLLNNPDFKGDTSQKLVDLCATTRSYDVVRKIRQRADYRAALASVPHPGGTQLTSSLADGNTQDFLNAAFIGGSDGLSPDRSTADISVQSRYSPSSPNSQSNTQDRPTTMPRSNVNPFVDSDDSSDDEISSSPSHRAANTTAHHFGSPFNSQPNTQNSQGSNSQNSQAPVGEPVEAQQWVKDLRSSLDNIDTSIDLAAVQPAAGSINQVLINSDFIEWIPLVPPTNSRRQTPPRKLPENKRARRRALYSRIQRMYKRQRAKAADSILEGTWDQDVSDIPLLRQDSYWRALFESESQFDDRSPPPIRDTKWSLLSPFSQQEVSDALKNTKPNTSPGLDGRTVSSIRKLDPQQLVSRFNLWALAGCIPEELHDGYTSLIPKEIGSDDPAKFRPITVSSAVVRLYHKCFAARLDADCPTSVRQKAFKHVDGCRDNTLVLQALLKRATNSSSPKDCFVAFLDVKKAFDSVSHESLLIAAKRAGVPPPLLEYFSYFYSSANTRLRVGGQTGEVINVGQGVRQGDPMSCWLFNVVVDWALAALNPAVGIDLASGVVSHLAFADDIALLAQTRQGLQENIGLVSDHLRKSGLSLSAGKCKSLSIVVSKGRTKKWYCDPTPRFRVAGEFIPSLGIAETYKYLGLRFNARGANSDIGDSLASMLKNVTAAPLKPAQRLWILRHKLAPKLQYQLVLGETTAGYLRFVDCTIRSAVRRWLKLPHDTPKSAFYADIRDGGLGITSFEHLIPSLKVRRFCSMVSSTDPIVREVCTLPWFKREMEKWRKPTHFAGLLTSTPQLRREAFKYDLTAQKVDGRGLRDSALVQGQHAWVENGNVLMTGAKFSAAIGVRLGTLPTRGRGSRGRPDSGWCDCCGAPTVEYLYHVLQTCPRTHGPRIARHDRILSEVEKMFTRLGYSTLVEPHFKTSQGLRKPDLVIYGEGKPCFVLDVAVSADNLPDPDTRHWDKVRYYSQYEEISAAVYNISGSRPEFSSVTLNWRGLFSPASHADLRRLGLTERDVGLLAAITVEQGAVIHRVFNTSTMVTHRGPGIRNIGR

SEQ ID NO: 1996 - protein, 1169 aa, synthetic construct
  source 1..1169: note = MG140-189 reverse transcriptase
MCIAPRSQRNENAASGSSQPTQSSGVGGPPFNCPYCASSYTTKTGLGVHKRRAHEDELMREREQQSRLKISRSRWTPQEERLLAIAEIALLRHRPELTGDDRKISLALSLGGTNAIGRTAESIRKRRLTDTYLHALNTVGLAGIPSSSPARRSTRSQTRQANSGLAPGNNTQELLEPTVEEIPLSPAISTPNPTPPTLSPSPSLSLTVEANSTSPGPTQEEEGIISAENQPVPEEALVEASEDPILLHVSDFESWKQSCLASLDIDAESAQLLEPGQPCQGNQAIIEQEFAKFSQKYPPNKLPRPKNRLPTAPQTLSKRKLRRLEFKMIQRAYKANKSRCARQILSGTWKIRDAQTAGSGRGGDHVDRDQLSAEQLFAFWKETFEHLSITDARDPASVRGTQWEVIKPITLDELNLVIKSMGKNKAPGADGRKVSSLCEIPPKDLLAQMNLWLTGGGLPACLCEGRTTLIPKVIGTNDPAKFRPITVTSVLVRAFHKVLTDRTEVHCPVSHRQKAFRSGDGLAENVLILQSVLKIATDTRKPRNLSIAFLDVKKAFDSVSHHSMLLAAKRHGMPGPLLRYIENIYSEGFTKLRSEEKESGVVKTKRGVRQGDSLSCPLFNMVVDWATSHLEPDLGFQLVSKMITHLEFCDDLALIAENDLFLQRQMNLVVEALGKCGLEVNPDKCTSISIKANTRMKNYFVRSEPAVKVGGKYIPALSITQVYKYLGINFGAKGTEQSAEPRLREAIRQISKAPLRPQQRLHIFTHHALPGVLHTLMLAKVTKGYLQNLDRVGRLALKRWLKLPGDTPTAFFYSHAKDGGLGILNLSDEVLAMKHKRLTKLGSGRDAELMSEICQLEVNKKIERSLYQAVTGGNPTRLEKKARLADWANKLHESCDGRGLRNSSYSFTLKQSPFGATQQPIGSDWLKAGKSDLVPGFEFVKMIGLRAATLETKSRAFRRRGDYNLPNPYCEHCFNTVLDQNGQALVQPMIDSLSHRLQTCSHNQGLRIRRHDSVQKRLVAYLKKSGWSAEGNPRINTSSGLKIPDLIIRRGSVAQVIDVQVGSDNYLDPDQGHKEKVEKYSVHEEITRYALNGLSEDNPKQVGFSACLLNWRGFWSPASARDLKRFGVSNQQLETLSKIVVRWGVSIWRKTRDSTFRVNTGLRRRLGIG

SEQ ID NO: 1997 - protein, 1220 aa, synthetic construct
  source 1..1220: note = MG140-190 reverse transcriptase
MPLLPLMYFGSGSINEQRCDEPKCRHQFTGIKEAEEHMRTVHGISDGWKCSKCHVEFDQGNRVAQHFPRCSGPPVAAPVVEKPHKCMHCDRSFDTPNGLGQHMKKTHPVEFDACAPALKKNRVTSELIDLIAQAEASIPAQKVDPKRLNLDILTALQKLYPDVAATVDRDRIQYIRARSKQHKVAYEERVSHHRLLADNVQTWARGLPPPRRQRLGAPRTVSPLVTVPDTSSNPPSPIQHTPPEPLVLPQDDSTPDGSSERTPPHSSQPPSEVAAVSNMGDEPEETPPSPPGGDSGGDPPSPSSPASSSEDAQDGPLMEAIKGKLRDILRNRTNSPLVLDINTVIQECLLVETWNEDAKQHVFHRLEEVLKKHRPKYWEEREQERVRPRREAEPPFLRNRAARRKHRYAKAQRLFKSRPKELMRPDILSEGPQEEAYAPTPDEAYETYKGRFGVPSKEEESEATPVGNEDLNLIWAPLSKKDVESALRTMPNSSAGPVYSKFNKAALKSLGSQALHRIFLIWQLICDVPDWCKENRTILIPKKPVPRSINDYRPLTIGAHLSRLYTRALAGRLTQHLPLHPRQKAFRPVDGCGENLALLEGVIADARKRNNTLYITFVDVAKAFDTVSHHSIERALRRLRCPTPFVNLVRNLYKGARTSIHLNGESTEPIHITNGVKQGCPLSPLLFNSVTDELLHLLGNEGGYRLPNGDLIASMAFADDLILISSSREGMVRSLRTMDLFFQARGMKVQPPKCCTIGLEKRRGGGLKSDLRPFSLIDPTTGERSNMRVMGPDAWTKYLGLEVSCAGLKSGRQLREEGITSLKQTLAHLHRLPLKANQKVHLLRTYVIPGLQYKWTKGPAALNMLREADRIIAAKVRAWLKVFPSTPMAFFRVPSSDGGLGIPSVQDLVTTGKARLHAKLCGSADSAVAYVAKNLLWGKEVRHYSRRLGGFQLGGSEDGANLSRKVREGHRRTLQTSTHGRGAETFRDDPLGNSVINDVNTKTGLVIDMVKLRTQSFPVRIAVGPTQRGNQVPYNTTCRVPECTRDESLSHVLQECPAVHGLRVQRHEVVDQQCTKWITDKGFHTLKEPHVVSRVDGNIYKPDRFFCEPGSDTLYVVDWTVPYETTRDAMKSAERAKELKYSPHKASLLLKAQEAFPDKVFSTVTVKGVAFGARGAILPATREFLHKKLKMSKRCISWVQHRVAQKSIGMVKCFFAGNRG

SEQ ID NO: 1998 - protein, 1174 aa, synthetic construct
  source 1..1174: note = MG140-191 reverse transcriptase
MWSTPQKAGARQGTARGAGEGAAPGSVDRASGVVVRSRLLLKRKREESPAGTPKKRRVPPMARKALFPAGKREGMIFMSVVKGWKPEPAGKGLPPTVMVGLRVPWLAQRCRLCDTHLGTVRTAQTHMRKAHKPRMIQFICDKCASTFKTPHRAACHAAKCGAARSGAGPTTGYACDTCPKTFSSQRGLSVHERRKHLGVYVSKAREQKERETEVSGWSRAELATLESIHESLGGKTGFLEAAASALPHYTRAQIQNRWRNLRRLGRKPVDKSPTGVARDLLPNLEEELPPRAPVALVKEHLARTVRAVSVDSVPPLSSSCKAINRYLKEVLTKLRSRCHPRVVSTARKTGSDRQNRFKMNRRLRYKNLQTLYRRNRSSAARWVLDGRERAVCRIDPKLVAETYRGIWERDDCFKGLGQFASLPEADNTSLFPPISPAEALQALRRMDQASASGPDGVERNGLLMWDRKGEKLADLFNAIMYSGRLPRCLKHSRTTLIPKASDQSKAGDISNWRPITIGSVFLRAFSRVLTQRLTEACAIHPRQRGFTDAPGCSENLAILDGLIRLSKSQRKTLAVVFIDLTKAFDTVSHKHIAEVLERRGVDELIRGLIQDSYRNCYTKVKTAHGDTRKIKIRVGVKQGDPMSPLLFNLALDPLLHMLERLGTGFSVEGTTITSLAFADDLVILSDSWGGMARNLEILDRFSNLTGLTTNPAKCHGFLIGINGPKRYTVNDCDAWSLAGIPIHMVGEQESAKYLGVQINPCKGILKPLLRETIKDLTGKISKALLKPSQKVELLRTYAIPRVVYVADHGSASQTLLDECDRDIRTQVKKWLHLEPFTTDGVLYSRCADGGLGIIKMAAHIPAIQLKRMMSLYDSTDECTKTISRASLPISRVWQLWRQVLREGDRPEKTSRPDLGQIDTSRANTSAWRATAFDKWSKLVSQGVGTVVFKDDRLSNSWTRDPEKHRLKQSELIMALQLRTNTLPTLSLLSKGRGPQESQQCRLCQQEKETAQHIIGNCVELKGNRMASHNKICEFLKKEGEDLGWHVMREKRLKSGDGITGVPDLIMIRDHIALILDVTICFEKSVGTLSDADSKKVGKYEKFREAVKHLNPEIQTVLVAGFPLGARGKWHQGNFRVLDAMGMRKSRARKVATILSKRALLQTIDTCKLFKILAR

SEQ ID NO: 1999 - protein, 1114 aa, synthetic construct
  source 1..1114: note = MG140-192 reverse transcriptase
VAQYEMSHPNERHINQKIRKELFPNRSVESIKSMRREDKYRALLPAKTPEQQKPPNLRKRGRRTPVSPQAGPVLGLDDQGGPALPVLDRANDPPGDPDDGSPSDRESRSSTSSSDSEPGEPPPLRNEQPDLQTDNVGERDDVEYVMRDAGTDPVVGLQEVYVPEREREMEASSLASKARIRDFLNEFRQTQGLDVQVPGSVEEAMTLLRSWLGELPEGQPRENRRARRRLPPDPTATGRQGAPGQQLGRTGRARRGFRGGRGRRRTAVEVPAGRPNNPNPNEPTGEVREAGNPQARTPPDQRRGAPGRAPRDRRANQFRLAQKCYNTSRKDCARRILQGKPFSEVKTSLPPGTAEFWTNLFGTPSAQEGQSASANPAVIHDRIGMPITLEEVMQHALCPGESAAGPDKVTKATLRRLGATKLTFLFNCFLMLGTPGPELAKGRTTLIPKKDEPASPSDYRPITITSHITRGLHKVLAKRIGDAIPVSQRQKGFVQGQNGCAGNSALLHALLAKAKQSRRQVAIVFLDCAKAFDSVSHDAIRKAAAQKGVPPLLVQYISNLYAAASTTVAGAATPNRKGVLQGDPLSSYLFNFVMDLALERLDEALGAIYDRKSRICFMAFADDLVLIGKDPKSLQTLLDQLSDALRPSGLTFGLLKCASLTVKIQPRSRVSYVEDHKYNIGGALLRAMGPTDTYDYLGLSFGFQAGVPDGNDCVRRLQDWASKLRRAPLKPQQKVWILHNVIVGKLRYQLSLSNVTRELIRRADRLLRTILRDIVKLPKDVPSSLLHSPAGNGGLALASFESAIPIAKVSQLREFQASGDPALVWLAANTTFFPGKRVLPRQLELDPPVTVQTLKARAKREVVEHARASIAGIGLQEAGGGNCPSDWVVSGNLVNKGHQYIGAIKTRMGAIPSKARLLRGRPGDRNCKFNCRTAESNNHVLQKCYRSYGGRLERHDKVLSVVSNACSNAGFQVVKEPWIEVGQGRRLCPDLIVYSETERMLWVLDAQVVSDAPSADQEIPQDMRRSHLDACHRLKVDKYAVPGLIQRVRSDYLDVPPKFGSITVNFRGVIAHATVRDLTEILPPPQLKEVLRLISLRALEFSWRMWTRFNGSAG

SEQ ID NO: 2000 - protein, 1071 aa, synthetic construct
  source 1..1071: note = MG140-193 reverse transcriptase
VQQLTSLTGGANKDPRLWEKSPRTQQGKLRHWSLRFDTPTASKTLVTGKSKKEPPPTDLVQSGTGESRKELTCPECLRAFKSKAGLALHRRRAHPVGYHAEIVKAVKAKSKVWSSEELRVISWYEAELLLDPSNSAASGNGLNVQLSRRIQETSGEVLSAEQIKNLRRKPEYKELVTRHKIGLERADGDKITTSNTPNLNDVQMSRIATLVRSMEQGLGREPSSLEEVVPGVWTGQNLEFVDHEYSRFEQRYPAPGFKVQRTPPKFLPARRRARRKALFARVQNLYKSSRPRCAKSVLSGQWSDDQSDKVPPEELHRFWRDIFERPSAIDQRQVEPKRDVQWSLLDPIEVEEVRRCLLGIDGQTAAGPDGRKLSDIKKIPVTELSLLFNKWLYAGVLPTALWEGRTTLIPKEPGTDDPAKFRPIGVSSLLVRIYHRTLARRLDEVCPPSSRQKGFRPGDGIAENTVLLKEILRRTTDQRSLAHLYLVFLDVKKAFDSVSHQSLSLALRRAGVPANLLNYVSGLYDNGWTRTLSGGKLSSKVKPNQGVRQGDPLSSFIFNAVIDWAMEEINHDIGYDFDGDLVPYFAFADDLVILAQSKMGLAEQVSRVVRSLRSSGLEVNSKKCSTMTVVRDGKRKQWAVDKEAYLTINEGLVPALSIEDAYRYLGLKVKASGTVAAVDRRLDEHLENISRAPLKPQQRLWILRTNVYPAMTHQLVLADVTKRLLRNLDVKLRRSVRNWLRLPADTPLGFFHADVKDGGLGLPALRYDIPERITRRMTKLQLSKDPVVARVATSPGHTERLAKWSEPTYLQDKPMSAGKDLRRMSWAELLHGSVDGRGLRDHSCVPYVHSWVTDGSGLSSGHLYNAAVAARGNLLPTRHRGSRGKTRDQQRRTCDACGPSQLETLSHISQVCPRTWGARIKRHNRLLAQLVRMLERRGYTTLAEPKFSSKRGNFKPDVLVWNVGQAAVIDVTVTTDNLPKPDSAHHAKVEKYSVVEEISEFVRKQVGVEPLYTALSINWRGALAPQSAADLRALGLTKRDLRLLSLITVEQTALIHRHFHQSTYRVRLRGQ

SEQ ID NO: 2001 - protein, 1047 aa, synthetic construct
  source 1..1047: note = MG140-194 reverse transcriptase
MQVSGPSYLCWATTPPKVKTIGTKNIRINEDAVAAAAVSSSNLGPSGTVGFTCSDCDRSFTSQRGLSLHRRRQHADTYHREAQPRNLRKPRWDHEEMLLLAKEELRLEVAGWTSSNNINLELHRIHPSRTVEAIKSLRGKKQQYRSLLAELRDRSLDQGDGQVTSGHPSLGLTSESECGWTAKLIEGIDWSLFPNLEPRLLERGMVSHSIHNQLDAAFEEFRCRHSCWHSPPQPPRYATRRPTVLNKQALRRKTYARVQNCFRNNRTRCASDVLSGQWKSEAKQIPLSQVEEFWTEIFSRPSEPDLRQPTPVGPTLWELVEPVSLDELNSILGAMSNKAPGVDGLRLSDLKSMDRTTLLSHFNIWLLTGYQPSGLCLGLTTLIPKDRTDDRPSAMRPITVNSVVVRCFHKLLAARMERLLPLSPRQKAFRAGDGLADNVYTARAILRHSKQHLKPLCLGLIDLRKAFDSVNHTSMLLACQRMGIPPPLIDYINNFYSRSTTQLKNSYERSDHIKVTRGVKQGDPLAVHIFNAVMDWSLAELDPHIGFTLGDQNINHLAFADDVVLFAASPGGLQSNLDALLEHLALSGFAANISKCKTFRIRTDGKAKRWVVDESPFLRVGPDTISALRPTESATYLGIDINARGCRANVEDKLKRGMGQLTSAPLKPQQRLFILRTNLLPSLFHALVLCPASIKYLKYLDGCVRKAVRAWLRLPNDTPYGYFHAASSDGGLGIPSLCHRIPLMKIRRLDRLEQTTDPVIAAVLELDEVRHEKQSVSRGVFLDGIQIQSKDVLKRSLAARLHGAVDGRGLRPSGEVRQQHTWVSSGTRLLTGRNYIGAIKIRGGLMPSLVRRSRGRPRTDVSCDACGRPSSLGHILQVCPRTHKGRLDRHDKIARIVTRIAVRSGKEVLWEPIIKTSSATQVCKPDLVIIDKTSSNAIIMDVTIVADNGDLDSEHNLKIKKYSSEDIHKWVRDRTQVRSVSNSAVAMNWRGLLALRSAQAILDLGGTSRDLSLLSAACCEGGYHCWILYNRSAYRAGKRQRSLRCAQ

SEQ ID NO: 2002 - protein, 1212 aa, synthetic construct
  source 1..1212: note = MG140-195 reverse transcriptase
MNDPTFERTAAIATVADVVAIPGVSFPWPCPDCDRSFAKKAGLSQHRRNAHLQEYLRDCKAEHKPTRVWSDEELRSLAQLVVQIPNRDEKSDRDLAALVYARHQQIGFNRSEEAVRARLRNPLFRQRVATLEPEGERLPEPPGVTPVTAADGGQPPEAVEGRTEPEGRDGASQGAGLSTEGDSEPLGNVDENLVQWRRCFSQWFENTVECQDGIVPALIGSDSQGLNPDRLHLLPTEQLEELYEDWLARFLAGHDRSPAAEIGSEREEGTHNARPAERPIRSGMRTQKGRIEAGTTGLETRRRHEGTRGNQREDVVQPGKRRLKQGWRAWIRRKWDQHPERTAKAVLAGDLTFEEFRELESGGPRRNGVAVPPDELYEFWGRVFGGEPGGREPANTGVPEPVDPRIAQEQHGGRAAQIGNSAELLVGREDPASRMRPLRRGEPVNAGEPRLAQESRAVSIDLMGEDSAPDAEVPEPRVESYWECAMPIRGDEVITALRNLKDGAPGKDGMRKRTLFKIGSRALNWWFNVFLMRGWVPARFKEGVTTLIPKVKTPGGPGQYRPITMSPMMLRCFHTVLAQRMGRLVPVSEQQKGFVPEDGTAYNVLLLRSIIAQRIGERKPLQLAFLDIRKAFDSVEHAALLRACGRAGIPPPLMRYLRFVHKDNSTSLKQAFPTRRLAVRKGVRQGDPLSTHLFNYVMDAACEKLPGEIGLQIGEKLMNRAMFADDTIIMAETKPGLTRLAEAFSSALATAGMTLNAQKCQTLNISVDGRRKRWYCDLDPFLNVGGEAVPALQVGDAYKYLGLGVRCGSPWMHGKDVIQPLETRLKRLSQSALKPQSKLYALRTVLLPGLYHTLSLTDRCDKTTKRIDKVVRRAVRVWLHLPHDAPTAYFHANIRDGGLGIQSVTALACRLRVERSGRFAASLDPGAQCLLQTDWWRRFQSRAHRSVNIGDIKVMNAGKELIRHTWKECLYKSCDGGGLKHHSEAPKSSKWLSERFSKLSGGEFVSAVLVRANLLATRERSSRGRLPLGDPARRCPGCPDKLATLAHMLQVCHRTHLYRIRRHNDLCSMLVAALERRGFRVLREPQIPSGSTFLKPDIIAVSKDEVWVLDPTVVADNADLGEVENAKFLKYGQEAVKEFALQQWSVLLGIDRGEPRFALSGVAVTWRGVWGGATWHALTVRLKIPVSWVQLMSVRVLTSGRKMWLTQKNRTG

SEQ ID NO: 2003 - protein, 434 aa, synthetic construct
  source 1..434: note = MG153-58 reverse transcriptase
MSEIPVHPRSRRLADWINPTGARKVHSLVDKVYQRKNLEMAWEKVKANRGSGGVDGQSLEAFAAQLDQQLARLQSELIEDAYQPQPVRQVQIPKAGKPGEFRTLGVPTIYDRVCQQALLNRLEPIFEPVFDEANFGYRRGRSTKDAMRKVWKEIQSGREWIVDADLRDFFGSVDHEKLLTLVAQRIADGRVLRLIRGMLKAGSYGKGRLFPSERGTPQGSVVSPLLSNILLTPFDQEMRRKGYQLTRFADDWVVTCTSAAEARAAIAAALRILSELGVQLHPQKTRVVHVQRGFEFLGYLVKRGKQLQLPPSKIVTGAKSRGLYAYPREKSIQRFKDRVRQLTRRGVPLKTNDLIEQLNPVLRGWGHYYKRAHVRTLFNKLDHWIERRIWSHRYKCWRNCGWKQLPKRKLYGEYGLTQLVKLIPSIALQNRAPS

SEQ ID NO: 2004 - protein, 465 aa, synthetic construct
  source 1..465: note = MG153-59 reverse transcriptase
MKAEETRQVTTLTEELARNADGAAMGAEAGVMTRLRTKAELERGGGLMEAVCERGNLMLAYQRVVENKGAAGVDGVGVSEFKDHLRQHWPTIKAKLLDGDYVPQPVRRVDIPKPQGGVRTLGIPTVTDRLIQQALHQVLSPIFEEGFSASSYGFRPGRNAHQAVKAAKQYVAEGRRVVVDMDLEKFFDRVNHDLLMEKLSKKIDDRRVHSLIRRYLEAGMMAEGIVSPRTEGTPQGGPLSPLLSNILLTELDRELERRGHAFCHYADDCNIYVKSKVAGERVMASLTRFLSDTLKLTVNVAKSAVAHPWERKFLGYGMTWHKAPRLRVASASLKRLEDKIREVLKGARGRSLLKVIDTINPILRGWTAYFKLAETKRVMEKMDGWIRHKLRCMMWRQWKRPHARARNLMKAGLMEELAWRSACNQRGPWWNSGASHMNHAFPKVYFDRLGLVSILDTVRRLQCIQ

SEQ ID NO: 2005 - protein, 459 aa, synthetic construct
  source 1..459: note = MG153-60 reverse transcriptase
MAEKPKDSRRVAGGTRERKGWERQASAVGTEEPRPKAEDLLEEVLRRENLMQALKRVRSNRGAPGVDGMTVDALTPHLKGNWPRIREELLNETYVPQPIRRVEIPKPDGKGVRQLGIPTVLDRLIQQSILQVLTPVFDPHFSESSYGFRPGRGCHDAVVAARSHVEAGYRFVVDMDLEKFFDRVNHDVLMARVARRIGDKRLLRLIRRYLTAGVMIEGVAQAREEGTPQGGPLSPLLSNILLDDLDKELERRGHRFCRYADDCNVYVKSKAAGDRVMESIARFLEKRLRLKINRDKSAVDRPWSRKFLGYTMTPHDRPKLKVSPQSVKRAKAHIKEIVRKGRGRSLAKVIGELTPYLRGWVTYYRLSQVKNIFEELDKWIRRKLRLILWRQWKKPRTRAGKMIRLGIERARALTSAYNGRGPWWNAGASHMNAAITIKWLNRRGLTSLLAEHQRLACLA

SEQ ID NO: 2006 - protein, 438 aa, synthetic construct
  source 1..438: note = MG153-61 reverse transcriptase
MIEQILTGKNLLRAMYQVRKNHGSAGVDHMPVTKLSELMSVNRDELTEKVRSGKYLPHAILGVKIPKGNGKMRLLGIPTVTDRLLQQAVLQIITAKFEFEFLDSSYGFRPNRNLHQAVLKAQGYINEGFQHIVDIDLQTFFDEVDHCYLLQLLHRKIKCIATMRLIRKWLRAPILIDGKLVKRRKGVPQGSPLSPLLSNIMLHELDRELERQNLRFVRYADDFSIYLKTKSKARRVGNTIYKFLRDKLKLKINREKSGIRRPVHFVLLGFGFVPTYKKGERGKYQLVVSEKSWKKLKQKLKTITRKTTPMSFKERIQKLNEVQRGWVNNFRMASILVKLQDVDGWVRNRLRYCIWHHWKKSERKRKNLIRLGVEQGQAYAWSRSQMGGWAIAQSPILGTTITLDRLKKRGYESMLDIYRRKSPQLNEPLYTRPVRTVF

SEQ ID NO: 2007 - protein, 408 aa, synthetic construct
  source 1..408: note = MG153-62 reverse transcriptase
MLDSYKRVTSNKGAPGIDNMCVDSLHEHLKEYWDSIRNQIETATYIPQGVRKVEIPKANGGVRLLGIPTVTDRLIQQSIAQVLSRHYDSSFSENSYGFRPCRSAHQAVIRGQGYLNEGYTHIVELDLEKFFDKVNHDKLMTVLSRVVIDKPLLKLIRRYLRSGIMDGGLVSVRTEGTPQGSPLSPILSNILLDELDKELENRGLRFVRYADDVSIYVKSKRSAQRVLSSITGYIENVLLLKVNTVKSKVSLPSKSSLLGFTYGKSGRSWKPRISSKSKRSIKDKIKLATKRNWSVNIEDRLRKLSQITQGWLSYYKLAECGVFLKELDCWIRFRIRMCIWKSWKRPKKRIRELVKLGIEKWRAYMNGNTRKGYCRIAHSGILHTALTNNKLCHLGFHSLFDSYKSCYV

SEQ ID NO: 2008 - protein, 434 aa, synthetic construct
  source 1..434: note = MG153-63 reverse transcriptase
MGLMEVILSKENLNQAYKKVVANKGASGIDGVTVEELGSYIRENQEEIRNALRNRTYFPKPVRRVYIPKGNGKKRPLGIPTALDRTIQQAVAQPIIDIYETVFSEYSYGFRPNRSCHDAIRQALEYLNSGYEWVIDIDIEQFFDKVNHDKLIQILREQVKDSNVLNLIRKYLRAGVMEEGIIKATKTGVPQGGPISVILSNVYLDKLDKELEQRGLRFVRYADDVLIFTKSEKAANRVMTSISSWIERKLFLKVNATKSKVGRPMRTKYLGFTFLKNGGQWKVKPTNEKKANLYQVMREYLKRGKATSRPLAVTIRRVNQIVMGWINYFRIGMMKQFMEEFGQWLRHKIRVIVIKQWKRPKTIFRNLSYLNRKYKNGFNEESIFKVANSRLGLYKSCGMNVVNYILSPNLLETKIKDGAGLLNPLKYYLRKVGI

SEQ ID NO: 2009 - protein, 470 aa, synthetic construct
  source 1..470: note = MG153-64 reverse transcriptase
MAQPQAITYQYDLFSEQRQDVIRPFPTSETVCGASGTKAFQVKEAGEQERALTPDLMSLVLSHDNIKAAYKQVKRNKGVAGIDQMPTGDFAEWYSQNAETLQSELYNGAYQPQGVKQVEIPKPNGGKRKLGIPTVTDRIIQQAISQVLNPIYERKFSDHSYGFRPNRNAHQALKKGSEYVSEGRVIVVDMDLKTFFDVVNHDRLMYLLSTTISDKTLLWLIRKYLQSGILIDGVVSQRTEGMPQGSPLSPLLSNIVLDELDKELERRGHKFVRYADDCNIYVRSQRAGERLLASISVFIETKLKLLVNKEKSRICPVNHTKFLGYTIQRDGSLSIANESVKRFKEKVRKLTKRNRGVNFEQIIVELEPVMRGWLNYFRHARCKRLLENIDSWIRRKLRCYRLKQCKRVITLQQFLKSHGVETWQSWILALSGKGLWCKSGCPQAHQALSNRWFNDVGLYNLSLNYARLNH

SEQ ID NO: 2010 - protein, 430 aa, synthetic construct
  source 1..430: note = MG153-65 reverse transcriptase
MHIMTTLLDKILDRQNMYQALKNVCSNKGASGVDGVTIDEIDGYIRENWPRIKVEIEERSYKPQPVLRVEIPKPNGGTRKLGIPTVMDRIIQQAIVQVLSPIVDKEFSELSYGFRPRRNCEMAVVKLLEYFNDGYLWVVDIDLEKFFDTVPQDKLMSLIHNIIDDPDTESLIRRFLQAGIMDKGEYQPSKTGTPQGGNLSPLLSNIMLNELDKELESRDLNFVRYADDCIITVKSQASAKRVMESITSWIERKLGLKVNASKSKITRPTNLKYLGFGFWKDGRANQWKARPHQDSIKSFKDKLKSLTQRKWSISFTERLKKLNQVIRGWINYFLIGSIKGVLTEIDSRLRTRLRMIIWKMWKVPSKRQWGLQKLGINKDLARLTSYCGDRYYFVATKTCVSRAISKKILTQRGLVSPIDYYEHRRNVRFN

SEQ ID NO: 2011 - protein, 424 aa, synthetic construct
  source 1..424: note = MG153-66 reverse transcriptase
MKLIDLILEDDNLNLACTRVIRAKGRNGVDKMSTSDLKNYLEENRELIKSSIIDRKYKPSPVLRVEIPKEDGSMRALGIPTVKDRMIQQAIAQVLSPIYEDIFSDSSFGFRPKRNAHMAIEKALNHMNQGKEWVVDIDLEKFFDKVNHDKLMQIISNTIHDGDVISLIRKFLVSGIIIDDEYKEAVIGTPQGGNLSPLLGNIILNELDYELESRGLSFTRYADDCLIFVGTEKAANRVMKSVTKYLHEVLKLKVNVSKSQVRKPGGLKFLGFSFTKDARHLYVARPHKISIKKLREKIKYITSRSWSISIKERLTRLKYLYRGWFNYFKYDKMKSLCIQIDGYTRFRLRICIWKQWKTISKKYKSLKQLGINKYKAWEWANSRLGYARVAMSFIMTRTVTNEVIKKKGYLSLESLHSQYIFNLN

SEQ ID NO: 2012 - protein, 429 aa, synthetic construct
  source 1..429: note = MG153-67 reverse transcriptase
MATELLERILSDENLEEARKKVMSNKGASGIDHMTVKELPEYIAGSGTETCDRIRARKWRPMPVRRVQIPKDDGTKRDLGVPAVKDRWIEQAACQVLTPIFEKEFSENSYGFRPGRRAEQAVLKAMGYMNDGYDWIVDLDLSKFFDNVDQDILMILVHNVIKDPDTESLLRRFLQSGVICEGSFQETRTGTAQGSPISPLLANVYLNEFDKEFEARGLRFTRYADDCIICVKSEMAADRVMAKVTAWLEKRLRVKVNATKSKVARPDEIKYLGHSFYHKEGKWRPKPHIKAVRKLEYNLGPLLKRNWGVSMDYRISKINEVIRGWVNYYRQCDMKTILKTIDRWVRLHIRIIYWKQWKTVRNRANHLWKLGMKKYWCWLYANTRSGYYVAGKWLSRWISNRLLRNVGLLSMEEYYLQNHPVSAQLMLVL

SEQ ID NO: 2013 - protein, 441 aa, synthetic construct
  source 1..441: note = MG153-68 reverse transcriptase
MKKSSKEIIVNVEIRKERTSMELLEKVLSDNNIKNAIERVVSNKGASGIDGMKVEELYSYFYEHGEELKEQIRTRKYKPSPVRRVYIPKENGDKRSLGIPVVVDRVIQQAIVQVLSPIYEKQFSENSYGFRPGCSCEMAILKLLEYFNDGYTWIVDIDLEKFFDNVCHDKLIAIIMKTIHDGELVSLIRKYLVSGVMENGVVSPTKVGTPQGGNLSPLLSNIMLNELDKELEKRGLRFTRYADDCIIVVKSEKAANRVMETITRFIEKKLGLKVNMTKSKVARPDQIKYLGFGFYTTKTGIIKPKPHLKSIQKFKRKLKQLTKRSWSISLKNRIIKLNQVIRGWINYFRIADMKSDMTNIGQHLRRRIRCIIWKQWKVPRKRIWAMQKLGADIEQAKAIACSRKSYWNSSMFIGIYITNNKLKQKGLVFPLDHYLKVHTVI

SEQ ID NO: 2014 - protein, 463 aa, synthetic construct
  source 1..463: note = MG153-69 reverse transcriptase
MKEGKQKTEKGCHAEVRTESRGMHGVQTSMGIIENNLVEVPVVEGDLLTHIISPSNMNLAYKRVVSNGGSGGIDGMEVKELLPYLRSHKDELVKKLLDGKYRPNPVRRVEIPKDNGKKRPLGIPTVVDRLVQQSIAQVLQPLYEPQFSPYSFGFRPHRGAHQALLCAQSIINDGNRFCIDLDLEQFFDNVNHSKLIEVISRMINDGRVVSLIHKYLNAGVLVAGKYEETRKGVPQGGPLSPLLSNIMLNELDKKLTKRGHPFVRYADDCMIFCRSERAAERILESISKFIDVKLFLKVNRDKTGTGSVCGKKFLGYSFYFDKDGKCQLRLHPKTIDKLKATLKKLTGRSNGMGYNQRKEALHLFIRGWVEYYKLARMKKTLETIDKWLRRRIRMCIWKSWKNPRTRIANLIKCGVPKWQAYKHGWVKGYWRASCMPDCTHAMSGHNLYRAGYRFLMDYYVLVS

SEQ ID NO: 2015 - protein, 430 aa, synthetic construct
  source 1..430: note = MG153-70 reverse transcriptase
MTHYLYMPMVAMTTVDSYFNRESVLNQAKKVKRKRSHGIDGISAKEALKIAEKEYSSIKTEVLNGTYQPDYILKVNIPKGNGKVRTIGNANTRDRIVQGCIHNYLYDVLDSELSNDNFGFRNNHNCQMAVLRVVDIIQEGYEWIISIDLMDCFTNLNKHLILWLLHNVNVDNRIINSINNIISNKYINGDIIEPVKGCPQGSNISPDLCNMVLNQLDKMLEERGHPFVRYADDIYVFCRSQKAAQRVLKSVKRFLEKKLKLIINEEKTQLFHCKEKVWSCLGFLIKQDVDIHIYMNPKKEEKLRMNIKGLMHNAMPNEMIQRINSLTCGWICCNYIADMGRATKRMDAYIKRSIRGYERRHDVKVDTTKLKSCHGYYKRMLQQVQSKEKESESVGNTNQKQSNNQPRNVDEHDTEVSLSVRAPPKSDSHK

SEQ ID NO: 2016 - protein, 472 aa, synthetic construct
  source 1..472: note = MG153-71 reverse transcriptase
MNVTKDGFKNRQLHIEDYLQMVSAEQKEYAEVFAHQRIAENNDIITDFQTDSLMEKILHKDNLNKAYKKVKSNKGAGGVDGMSVDELLYFLRDNQEQLIQRIKNGKYKPNPVRRVEIPKETKGEFRKLGVPTVVDRVFQQAITQVLSPIYEKQFSENSFGFRPTRSAHDALKQCQTNVNDGYVYVVDMDLEKFFDTVCQSKLIEVLSRTIKDGQVISLIHKYLNAGVISRGMFEKTEVGMPQGGPLSPLLSNIMLNELDKELTRRGHRFVRYADDCMIFCKSKKSAERTLENIVPYIEGKLFLKVNRTKTCVAHISKVKYLGYSFYRYKGKCRFRIHPKSVEKMKNKIRELTDRHNGWGNEYRALKLTQFIRGWVNYFGKADMKRLLQDSDEWLRHRIRAVYWKQWKKTKTKYRKLKELGMDEKFIQWHANMRQGIWNCSNNRMVQFALNNTKLREWGYPTFTEFYLKICEN

SEQ ID NO: 2017 - protein, 474 aa, synthetic construct
  source 1..474: note = MG153-72 reverse transcriptase
MKDQTNEESLDPVPGELPDTAGRPGAASAQHVEKNGAAPVDSDALFRQVLDGANLNLAWKQVKANKGAPGVDGMTIDEFPAFARENWERIRSQLSEGTYHPAAVRRVFIPKPDGSQRPLGVPTVLDRVIQQAIAQVLTPLYDGSFSNHCYGFRSGRNAHQAVQEMEVAWKQKRHYAVDCDLKAFFDTVNHDRLMEQLRRKIGGGKLLRLIGRYLRAGVELPDGSREDTPLGVPQGGPLSPLLANIVLDPLDKELERRGHSFARYADDFLIFVKSAKAAERVMGSVMNYVEKRLGLTVNRTKSKCGKLTDCTFLGFQISARGKVKWSAKAFLRFKQRVREITKRNRGQNVQSVIDELRRYAAGWMNYFGISHTYAEVMDLDEWIRRRVRLYHWKQWQRPRARRRNLIRLGISPGEVHRASRSRKGYWRMSQNSLVCFALNNRYLKERGVPELRDIWIRLHYGDQPKPKGTGKLVT

SEQ ID NO: 2018 - protein, 463 aa, synthetic construct
  source 1..463: note = MG153-73 reverse transcriptase
MKAEYSKNRSCPQRNSAEHEAYVGAQSVGNREVGEQGGADLLERILSRDNLNRAYKQVRANKGAPGIDGMTIEDALPWLREHREELLESIRQGKYKPQPVRRKEIPKPDGGVRKLGIPTVIDRIIQQAIAQQLVPIYEPLFSDDSYGYRPGRSGQQAIRKVKWYAEQGYTSAVLVDLSKYFDTLNHELLMNLLRKNIHDKRVIELIKRYLKAGVMENGLLVKTAEGSPQGGPLSPLLANIYLNEYDREMASRGVPVIRYADDIVVLAKSPRAAQRLLESTQRYLEGKLKLKMNVEKSKVVSVYSIRNFKFLGFALGKGKNGVYIRVHTKTLKKAKAKLKELTSRSQGRNVRKVMENVKVYIRGWLGYFGIASMKTTMQEWDGWLRRRFRMYIWKQWKKPRTRVKNLMILGMPEWQAHRNGNTRKGYWAVAGSGILTHTITNKRLAQAGYYSILDRYESLHSCD

SEQ ID NO: 2019 - protein, 420 aa, synthetic construct
  source 1..420: note = MG153-74 reverse transcriptase
MKLMDEVLSKDNLNQAYLQVTRNKGASGVDDMTCEEVKDYLKVHGDELISQIKSREYKPLPVRRVEIPKPNGGVRKLGIPTVIDRIIQQALVQKLTPIFEPTFSEYSYGFRPNRRCQNAIDKALELLNQGYEWIIDLDLEKFFDNVPQDKLIRLVDNMVNDSDITALIHKYLKAGVLINGEFEETTIGTPQGGNLSPLLSNIYLNELDKELERRGLHFARYADDCVIFVKTENAAKRVMFHIVKFIETKLKLKVNAEKTHITRPNNLKYLGFSFWKDKEEWKSKPHKESFVKLFLKLKKLVKRSWSIDLDYRIKKINEVLRGWINYYRQSSMKRKLVKISGWLRNAVRVIIWKQWKLPCARRKALIKLGLSENEAKCVSNSRKGYQHICHCWSITKAISNSRLKKRGLLDPLEYYLKPIA

SEQ ID NO: 2020 - protein, 474 aa, synthetic construct
  source 1..474: note = MG153-75 reverse transcriptase
MITENLRMGCPQMDSTECEEYAEALSIYLPEDIERETRLNTEHLMEEVISIPNMIRAMKRVKRNKGAAGVDGMEIPEAMDWLQAHFAEVQEELAGGYYHPSSVRRRVIPKPDGGERKLGIPTVKDRVVQQAIAQILVPLYEPQFAENSYGYRPGRSGQQAIMKVKEYAEEGYVWAVVLDLSKYFDTLNHDRLIRELRRTIKDEKVMIAIKKFLKAGVMENGVVIETREGSPQGGNLSPLLANVYLNEFDCTYAERGVPEIRYADDIVLLAKSQRAAERILAGSIAMLEGKLHLKVNRDKSRIVNLANNKGQFKYLGFGMYKGRDGFKIVPHVKSRKKFKKKLKAMTNRKRAGKFEDICMELKRVINGWMNYYGIAEMKTWAKEMDGWLRTRMRMIIWKRWKNPRTKYRKLKGLGIPPEYAYMAANTRKGPARAVRLTTVLRALSNRKLEAWGYPSISRSFEHKHQSVVQLRFAF

SEQ ID NO: 2021 - protein, 426 aa, synthetic construct
  source 1..426: note = MG153-76 reverse transcriptase
MPEDKPREATLETVLAAANLWAAWRAVKANGGAPGVDQMDMERSARHLRAHWEAIRSKLLAGAYVPGAVRVVSIPKANGGERQLGIPNITDRVIQQAIHQVLSPVWEPVFSAHSHGFRPGRSAHDAVKAAQAFVKAGKTWVVDIDLKSFFDRIDHDKLMHLLRGRIEDQRLRALIGAYLRAPMQHRDGRKEKRWKGAPQGGPLSPLLANIALDPLDKELEKRGVSFVRYADDIAIFASSARSAERIYASVVAWIERHLKLEVNREKSGTGPSGKSSLLGFRVHEDGNVEVSPKAIAKLKEKVREHWDARQSLTSERLRAQWQDYIRGWWNYFQLANWRREVVRLSGWIRRHMRKCFWLRWKTPRGRVNALKKLGVTGRALGQGSSTRGAWPMALHPTVQQALSNRALARYGFIIPWQVAAAPGTGR

SEQ ID NO: 2022 - protein, 488 aa, synthetic construct
  source 1..488: note = MG153-77 reverse transcriptase
MSNSNLIVETSNCKDTKDISDKSNTPTYDHVTLENILSHGNLTLARISVEINKGAPGIDKMTTDTLRRYLEIYGDELEKQIRTGKYKPLAIKRVYIPKENGQKRPLGIPTVIDRYVQQAVTQVLSEAYEPHFSDSSYGYRPGRSARQAVKQLTQYVNCGYTHVIDLDLSKFFDTVNHSKLLQILSSKIKDGRVISLIHKFLKAPVQEDGQIGPNTRIGTPQGGCISPILANILLNELDQLLDRRGIKFLRYADDMCIFAKSERAAKRILDNVTRFIEKKLFLKVNQDKTKICEVGPEVQFLGFSLKRVYKNFKKGIVPEKCKWYPSVSQKKLDKFKQKVKELLDRKAPGGVLNTMNRYNRFIRGWHNYYRGALGQYWLQRTCMLIRRRIRQLYWKQWKTAQNRFKNARERWSKAPEIGDKSKRAIPYSSSRYWRMSKSYALNKILGNKQIEAEGWLSLETMDKMHWDKLASEKCNGTAVDARPARPVV

SEQ ID NO: 2023 - protein, 443 aa, synthetic construct
  source 1..443: note = MG153-78 reverse transcriptase
MKTSVEGQPPEVPARDKQGGEIRARWAWVEPQVWTERMLTALETGVKGNQWFSLMDKVYRLDTLGIGWEQVQANAGGSGVDGITVERFAKDCPRGLLVLNEQLRQGSYRPHPVKRCWIPKLGTKQTRPLGIPTVRDRIVQSALRLVIEPIFERDFAEQSYGFRPGRGCKDALRRVQQLLDEGCTWIVDADLKRYFDTIPHEGLMAKVGERIADGRVLDLIKSYLKQGVLDGLSAYEAGEEGTPQGAVMSPLLANIYLNPLDQQMVRQGYEMVRYADDFVILCRSEEAAQAALREVQAWVQANGLTLHPEKTRLVDMMQPGGFDFLGYHFERGHRWPRKKSLMKLKDTIRALTPRTSGQSLDSSIKKLNQTLRGWYGYFKHGHRSRFERIDQYTRGRLRAILRRRSRRRGRSRGHDHQKWSIHYFTAAGLFSLVQADLATRRSP

SEQ ID NO: 2024 - protein, 467 aa, synthetic construct
  source 1..467: note = MG153-79 reverse transcriptase
MQNTGHRSGSGCPPEDRMEAEGLPGAQSADKAKEEERGGAGNSLIVQVARKSSLLAAYKKVRANRGAPGIDGMTVDAARGYLNEHWREIAESLINGTYKPQPVRRVNIPKPDGGTRALGIPCVVDRVVAQSLAQALEPIFEPGFSDSSYGFRPGRSAHQAISKAKEYVQEGYTRVVDIDLAKYFDTINHDILMDMVMDKVKDRKAIKLIRAFLKGGAMEGGLLSETDEGSPQGSPLSPILSNVYLTRFDQWLEARGHRFVRYADDCNIYLKSQRAAERVMANSVEFLEGKRMKLTVNREKSQIGSPFRLKFLGFSMYRLNGKAAIRIHAKTINRLKQKIRAITKRNRGRSFDAIAAELKQYTDGWLNYYGIADSRSVIGMINKWIRRRLRMYIWKQWKTVKKRHKSLLALGATKQEAWKWANTSKSYWRTSGSQILQTTITNEILERRGYSDMLKKYDSVHLKFRTA

SEQ ID NO: 2025 - protein, 470 aa, synthetic construct
  source 1..470: note = MG153-80 reverse transcriptase
MNVTKTGAKCSQLRKEGSTQKDSAEHEGYAGVHIPERITETDEANTSKSMEKLLEKIVSRDNLNEAFKRVKANKGSHGYDGMGVDELLHYLKENGETIKQQILDGKYRPNPVRRVEIPKENGKKRNLGIPTVVDRFVQQAIAQVLTPIYEKQFSENSYGFRPKRKAHDAIRKSQENIDGGYRFVVDMDLEKYFDTVNQSKLIEVLSRTIKDGRVLSLIHKFLKAGVVVKHKFEETELGVPQGGNLSPILSNIMLNELDKELQKRGHRFVRYADDMLIFCKSRRSAERTLANILPFIEQKLFLKVNREKTVVDDARKVKFLGFSFYSRKGQTKVRIHPKSIAKMKAKVKELTSRSNGMGNEERVMKLKRYITGWINYFKIADMKKLLQTTDEWMRRRIRMIFWKQWKRVRTRFDRLKSLGIHEQKAWEYANTRKSYWRTSKSPILSKSLNNTTIKGLGFLFFSDYYRQVNV

SEQ ID NO: 2026 - protein, 441 aa, synthetic construct
  source 1..441: note = MG153-81 reverse transcriptase
MLDSEEMEMTDMKTEKSLLDDMLSKENLNRAYQQVVRNKGAEGVDGMKYTELKDYLKEHGDEIKEQIRNRKYKPSPVRRVEIPKESGGTRSLGIPTVVDRFIQQAIAQVLTPIYEPLFSENSYGFRPNRCCEMAIQKVLEYMNDGFQWVVDIDIEKFFDHVNHDKLITLVMKHVKDGEIVSLIRKYLKSGIMMDDEYKESVIGFAQGGNLSPLLSNIMLNELDKELEARGLNYARYADDCLILVGSQKAADRVMENVSKFIEKKLGLKVNMTKSKVTKPNDIKYLGFGFFRDNRSKLWKAKPHQKSVEKLKKKLKQLTSRSWGVDMDHRLRRIKQVLRGWVNYFRIGKFKEICGRIDRNLRYRLRMCIWKQWKTVGRRYKALRQLGMEKETAWKWANSRKGYARVASSPILTYTVTNKRLAKRGLASMTDLYQKINKTCLA

SEQ ID NO: 2027 - protein, 451 aa, synthetic construct
  source 1..451: note = MG153-82 reverse transcriptase
MVQKSRQLELPLESRGEAPRVERSGQTESATSGNARPGMDLLLEKALERPNLLQALKRVQQNRGSPGSDGMTVDELPDHLRANWPTLREQLLTGRYQPRPVRRCEIPKPDGGKRELGIPTVLDRFVQQALLQVLQPLFDGSFSEHSYGFRPGRRAHDAVCEARGYVQSGKRWVVDVDLEKFFDRVNHDVLMSRLARRITDKRMLSLIRRYLTAGVLADGVVVERYEGTPQGGPLSPLLANVLLDEVDQELERRGHTFVRYADDLRVYVGSLRAGQRVMDSLIRLFGKLRLKVNHAKSAVARAWDRPFLGFAFWAARGGRVAIRIAAKSIAKMKVRVRQLTRRVRGRSLDQIAVELRRYLLGWKGYFGLAETPGVLRDLDEWIRHRLRAVQLKHWKRGRTIYRELVVRGMAPTKAKQVAINARSWWRNSALGIHSALPNSLFDELGVPRLAS

SEQ ID NO: 2028 - protein, 472 aa, synthetic construct
  source 1..472: note = MG153-83 reverse transcriptase
MNVTEIGTKESRKHYSDNDYCQKNSTEYEGYDRVLTEKRITENNNTDADSEVNGLLERILEPENLNRAFKQVKKNKGSHGVDKMEVEYLLQHLKDNGEELRQSILKGKYRPMPVRRVEIPKDNGKKRQLGIPTVIDRMVQQAIQQILTPMYEPTFSETSYGFRPRRSAHDALKKCKEYANEGFTYVVDMDLEKFFDTVSQSKMIQILSRTIKDGRVISLIHKYLRAGAIVDSKYEETTVGLVQGGPLSPLGSNVMLNELDKELEKRGIRFVRYADDMLLFAKSKRSATRILEHILPYIEGKLKLRVNREKTSVAYIGRIKFLGYGFYPAKGGIKLRVHGKSKKKMKNRIREITSRRQGISYEELKLKLKQYVVGWVNYFKLANMKKLLISIDQWLRRRLRMFIWKRWKKVKTRYKRLKQLGYNHSDAIKYANTRKGYWQVAGSQILGCSITDNRLRKQGYQFFSDYYKTVSA

SEQ ID NO: 2029 - protein, 468 aa, synthetic construct
  source 1..468: note = MG153-84 reverse transcriptase
MKGRMQKITMSSGSRPQKDSTECESYEGVQTFMDMTENNLKEVQFERGNLLEFILSPYNLNQAYLQVKRNHGSCGVDGLSTEELSGYLKRHKDELVESLKSGKYRPNPVLRVEIPKENGKTRPLGIPTVVDRVIQQAISQILSPIYERQFSDNSYGFRPHRSCHKALKRAQEYITQGYKYSVSLDLERFFDTVNHAMLIRLLSRTIRDGRVISLIHKYLTAGVMVRCGYEESVEGIPQGGPLSPLLANIMLNELDKELVRREHKFVRYADDCMILCRSKRAAERVCDSISTYIESRLHLKVNRDKTKVAYVGRVKYLGYSFYMMNGKCRLRLHPKSVTKMKARLKELTSRSSGWGYAKLKDKLNQFINGWMNYFKMADMRNVLEQTDKWLRHRIRSYVWKSWKKVGTKFKNLMKCGIDRWLAWQWANTRGGYWNTAGSPILSRVISTERLKLQGYPCLVDLYVKLHQH

SEQ ID NO: 2030 - protein, 465 aa, synthetic construct
  source 1..465: note = MG153-85 reverse transcriptase
MIDDKAEAREAGAKGQEAGQYPVGRPCGAESITAAAGQTKAEVSRLMEAVIESSNVWSAYQKVVRNGGAPGVDGLTVGSFKDWLKKHWPRVRAALLDGSYLPSAVRAVDIPKPSGGVRTLGIPTVLDRLIQQALLQVLQPIVEPTFSASSYGFRPGRSAHQALRAAKHYVQEGRAWVVDMDLEKFFDRVNHDILMSRVARHVDDARVLKLIRRYLEAGLMRDGVETARDQGTPQGGPLSPLLSNILLTDWDRELEKRGHAFCRYADDCNIYVRSEAAGQRVMAAMKVFLEERLKLQVNDAKSACARPWKRKFLGYTLTNAGGWIRLKVAQESVMRLTGRVRELMRQGRGRSLTHTIETLNPVLRGWIGYFQLSESKTVWKDLDGWLRRRLRCLLWRQAKTRQRRTALLRKQGLSEARAWHSGHNGQGPWWNSGASHMNQAFPKAFFDRLRLVSMIDTSRYLQCHS

SEQ ID NO: 2031 - protein, 427 aa, synthetic construct
  source 1..427: note = MG153-86 reverse transcriptase
MSELLEKILSNDNMNAAYKRVCARKGAGGVDEVTVEELGDYIKENWESIREQIRRREYKPQPVRRVEIPKVGGGVRKLGIPTVMDRVIQQGVVQVISPMCEPLFSEWSYGFRPDRSCEMAVRQLLVYLNEGYEWIVDIDLEKFFDNVPQDRLMSLVHDIINDGDTESLIRKYLKAGVMTPQGYEETKLGTPQGGNLSPLLSNIMLNELDKELEARGLRFTRYADDCVIAVRSESSAKRVMRTVTDWIQRKLGLKVNMTKTHITRPQKLKYLGFGFYKDSKAKEWKCRPHQESVKKFKCRLKELTCRKMPGTVTGRIEKINQVTRGWINYYALGSMKKAMTEIDAHLRTRLRIIIWKQWKVPKKRQWGLQKLGVNKDLARLTAYCGDRYYWVATKTCFSRAVSKKVLAKAGLISCLDYYSERHALKLC

SEQ ID NO: 2032 - protein, 471 aa, synthetic construct
  source 1..471: note = MG153-87 reverse transcriptase
MKGRMQKISTQSDSRPRKDRPEAESYEGVQTYMDVVDGCLTTEQPKTEYPLLEQILSSANLNAAYLQVKRNGGAAGVDKMDCDRLLGYLIEHGEELKERIRQRTYRPNPVRRVEIPKDNGGKRQLGIPTVVDRMFQQAIARVLSPIYERQFSEGSYGFRPKRGGKRALIAATKIVERGYHYAVDIDLERFFDTVNHAKLIEILQRTVKDDAVISLIHRYLNAGVMKDGKYEPSEEGTPQGGPLSPLLANIMLNELDKELEKRGHPFVRYADDGLIFSRSKRAAERVRESISKFIEGHLKLKVNREKTEVAYIGRLKYLGYGFYVRNGKCRLRLHKKSEAKLRRRLKAITSRSNGMGYGKRKDALRQYLRGWTEYYSLADMGNKVKEIDQWLRRRIRMCIWKSWKRIKTRVCNLIRCGIDKRKAYEWGNTSKGYWRIADSWILTRALPTDRLHTAGYDWIGCYYTASSLPKG

SEQ ID NO: 2033 - protein, 437 aa, synthetic construct
  source 1..437: note = MG153-88 reverse transcriptase
MRLSDLILESSNMEKAIRKVVSNRGSAGIDDMPVDEIRAWMEVNGDELAEQIREMKYKPSPVRRAYIPKPNGKKRPLGIPTVVDRVVQQATYQILYPIFDSTFSDSSFGFREGRSAHQAIERTLEYLNEGYEWVVDLDIEKFFDMVNHDKLISIIRLKVNEKETLHLIRSFLKAGVMEEGKLNRNDLGTPQGGNISPLLANIYLDVFDKELENRGLRFVRYADDVTIYCRSEMAANRVMRSVSSWLERKLFLKVSPTKTHVVRPPESTFLGFTFWKGRDGWKCKPANDRKQRLYKNMKELLCRRKAAAMPLSYLFTKVNQKVRGWINYFSIGSMKRFLIEFGQWLRHKIRVVIFKQWKRPKTLFKNLMILNKQFKTGFSKEEIRQTANSRLGLWRTTGWRTVNFILSPKVLALPNKEKERPGLIDPVGYYLNLQNKS

SEQ ID NO: 2034 - protein, 413 aa, synthetic construct
  source 1..413: note = MG153-89 reverse transcriptase
MISLEKVLSPQNMLLACKRVRANKGAPGVDGMTVDELEGHFRRHWASICAHIREGRYIPSPVKRVDIPKPDGGTRMLGIPTVQDRLIQQAIAQVLVEHFDPTFSEFSYGFRPGRSAHQAIEQTQRYIAGGCSWIVEMDLAKFFDTVNHDRLMSTLERSCRDKMLIRLIRRYLRTGILADGLVTPRDEGTPQGSPLSPILSLIVLDELDKYLEKRGVKFCRYADDCNIYVGSERAGKRVLENTIKFIEETLKLRVNRDKSGVFRPRRAKFLGYTFVGTTGQPLVHPKSFKRLKDKLRTVFHRARGGSLFQTIGELNAILRGWRQYCRLDNRKDVFEALDIHIRRYLRKLVWIAWKRPRTRERELRRHGLDGFRAWKSANNGRGAWWNVGALHMRDAFPKSFFRRQGLYSLLEMR

SEQ ID NO: 2035 - protein, 444 aa, synthetic construct
  source 1..444: note = MG153-90 reverse transcriptase
MNNSDPSMNPDGGDAVWRSDREPALDNLMARILERDNVRKAWQRVKSNKGAPGSDGMSLEDFPTYAREHWQEIRQSLLDGSYQPRPVRRVVIPKPRDKGERKLGVPCVIDRVIQQAILQVLTPMFDPAFSESSYGSRPHRSAHGAIQQVKTIVKAGHRIAVDLDLEKFFDTVNHDVLMSRVARNVPDKVLLGLIGRYLRAGVLVGETIEPTSWGTPQGSPLSPLLSNILLDDLDKELEARGHRFVRYVDDLVILVKSRRAGRRVMAKISRYLTQTLKLKVNREKSRVVKIEDLNYLGFTFRGIRIFASDQALQDFKHRLRGLTSRSWGVSMSERFERLNRYLRGWMNYFGISQHYTPIEELDGWLRRRIRMCYWKQWRRPRTRIANLLKLGTSKRHAILTGISRKGFWRLSKTLATQTGMTNEWLEQQGLLSIRKLWMKVQGYV

SEQ ID NO: 2036 - protein, 462 aa, synthetic construct
  source 1..462: note = MG153-91 reverse transcriptase
MHREQKIGKSGYSCEGTVEPESNKRARSVAGLEAEEKNGAYSLLEEILHRDNLNAAYKRVKQNGGAAGIDKMTVHEMLPYLREHGGELIASIRGGWYKPKPVRRVEIPKPDGGVRLLGVPTVIDRMVQQAITQVLQPIFEATFSDSSYGFRPGRGAHQAIVKAKEYYEEGYTSVVDIDLARYFDTVNHDILLGLISREIQDKTVVRLIRKFLKSGVMANGLYSPTEEGTPQGGNLSPLLSNIYLTEFDRMLESRGHKFVRYADDSNIYVKSRRAAERVMESCTKFLEGKLRLKVNRDKSKTGSPLRGKFLGFSLYKIKGKTGIRPHQKSLRRLKRNIKKLTSRKQAKSAEGILVVLKRYTTGWLGYYSIADMKSKIQEINEWMRRRIRQIFWKQWKKIRMKHDNLRRLGIPDKKAWEWANSRLGYWRIAGSWILTRSLTNEYLASIGYDDIAKRYEALHLNY

SEQ ID NO: 2037 - protein, 469 aa, synthetic construct
  source 1..469: note = MG153-92 reverse transcriptase
MNVTNDGFKDRQRHIEDYLQMVPAEQGENAGVSVYQRIIENNNTITDFWTDNLLELILRTENLNMAYRKVKSNKGTGGIDGMQVDELLPYLKENQTFLIQQIRDGKYKPNPVRRVEIPKEEKGTRKLGIPTVVDRVIQQAISQELTPIFEEQFTDNSFGFRPRRSQHDALRRCQEYVEEGYEYVVSLDLEKYFDTINHSKLIEVLSRTIKDGKVISLIHKYLNAGILQNGMFEETESGVPQGGPLSPLLSNVMLNELDKELERRGHKYVRFADDCLIFCKSRKSAERTLKNIVPYIETKLFLRINQEKTEISHISGIKFLGYAFYQSKGRCRLRVHPKSVRKMKDKLKKLLEKGNGWGNDYRKQRLKDFITGWVNYFSLADMKKLMQVTDRWIRRKIRAIYWKQWKKVKTRYRMLKSLKLPEYRVHELANSRKGYWRMAKVLNVALTNKLLAKLGYKSMLDHYLKICEN

SEQ ID NO: 2038 - protein, 438 aa, synthetic construct
  source 1..438: note = MG153-93 reverse transcriptase
MIEKVLHQGNLLQAYRQVLANKGSAGVDGMPVNELAAHLRVNRDALASAILGGQYLPQPILGVEIPKSNGQKRLLGIPTVTDRLLQQAVDQTIAPLFELEFKAHSYGFRPNRNAQQAVLQAQKHINAGYQHIVDIDLKSFFDEVDHCLLLQLIYRKVKCPLTLRLIRKWLRAPILVGGKLTKRRKGVPQGSPLSPLLSNILLHELDKELERQGLLYVRYADDFSIYTQSESEARQIGNSLYLFLKNKLRLPINREKSGIRRPADFELLGYRFVPTYRKGDKGKYQLVVAEKAWVRLKQNLKELTRKTTPSAFAERIEQLKEVQRGWVNYFRLASMQEKLKQVDSWLRNRLRHCIWHDWKKPERKRKNLIQLGVSKHEAYAWSQTRKGGWAVAQSPILVTTITLKRLVKKGYESLFDYYKQVSPQLNEPLYTRPVRTVV

SEQ ID NO: 2039 - protein, 438 aa, synthetic construct
  source 1..438: note = MG153-94 reverse transcriptase
MNRSVPAATRSRDEPEAGERSEPESIPNATLLARVLARENLQRALKQVRQNRGAPGIDGMTVDELPSYLRHHWLEIRAQLEAGTYCPQPVRRVEIPKPDGRKRLLGIPTVLDRFIQQSIAQVVSAQWEPHFHPRSYGFRPQRSAHQALRQLQTDIRDGKRWVVDLDLEAFFDRVNHDRLVSRLRRHVPDAALLRLINRFLKAGVRVGHATEATTRGVPQGGPLSPVLANVVLDELDWELERRGHRFVRYADDCNIVVGSQHAGERVKASVTRFIATTLRLSVNANKSAVDRPWNRKFLGFTITSKGTRLKVADAAIDNLKHRVRELTRRTRGHRLTDVIAQLREALLGCKAYFGVAEVQSPLREIDKWLRRKLRCYTWKQWGRAGYRGLRRRGVSVREAWNTSKSAHGPWRLSRTPALAQALPARYFSTLGLPTLAAA

SEQ ID NO: 2040 - protein, 432 aa, synthetic construct
  source 1..432: note = MG153-95 reverse transcriptase
MNTSKQQEGGVKSRVWYSLYDRLLHADALSAAFRKVKSSNGAPGIDGQSCKGFALNQTEEIAKLLSELRTKTYRPSPVKRVELVKEDGSIRLIGIPTVRDRVVQQVLKRAIEPIFEPQFHDGSYGYRPKRSPQKAVAHAIELMRERGLEQVVDMDLSKCFDRLDHDLILKAVKRSITDGSILALIRMFLESGVMKYGELSPTEIGSPQGGVISPLLANIYLNDFDQTMKSRGHEVVRYADDILIFKGSRKGAEHALKVATEVLEKELKLTVNQRKTHLANLDEGVAFLSFVIYQSYTLIKESKVDGLKAKLKLATRRNTPVNLEKVIRDINPILRGFVNYFKLANCKTVLRNVMSWLRRRLRALQMKLWKTPAKLHRKLRQLGYKGEFKQIKMASWKNAACQQAHMAMPNAWFKEIGLYHPPQLETGQLTLI

SEQ ID NO: 2041 - protein, 465 aa, synthetic construct
  source 1..465: note = MG153-96 reverse transcriptase
MLKAEYRKGCLQMDSAEHKEYAGAQSAEARERREQDGAKDLLEAILDKRTLFEAFKRVKANHGAPGIDGMTVDEVLPWLQEHVEELRQSIRDGKYKPYPVRRVMIPKPDGNGERKLGIPTVIDRIIQQAIALKLTPIFEPLFADESYGYRPGRNCQMAMMRVKQCVDEGYIHVAEVDLSKYFDTLNHELLMNLLHRQIQDKQVTELIKRYLKSGVMENGVVTETEEGSPQGGPLSPLLANIYLNEYDQEMKRRGVAIVRYADDIVVLAKSQRAAERLLESSRKFLEDKLKLKLNQDKSRAISIYSKKFKFLGYAMGKNKNGNYIRAHKSSLKKAKQKLKEKTKRNRGKNVREVMKAVKDYIIGWLNHYHIASIKNTLIEWDGWLRRRFRMYIWKQWKKPRTRVESLRKLGIPSWQAYQWGNSRLGFWRVAGSPVLTRSITNEKLVQAGYFGILKQYERLRKHLSD

SEQ ID NO: 2042 - protein, 422 aa, synthetic construct
  source 1..422: note = MG153-97 reverse transcriptase
MLEKILNRRNIERAIKAVERNHGAGGVDDRQSDELRPFVNASCQSLVNRVREGGYQPSPVRKVEIPKDTGGVRMLGIPTVLDRMLQQAIYQVLSPIYEEAFDKHSYGFRPRKNAHQAVFTAQGYLNEGNSWIIELDLEKFFDKVNHQKLMHLLSQKVKDKSTLLLINSYLKTGIMEGGVVSQRIEGTPQGSPLSPLLSNIMLHELDQELNKRGHKFVRYADDCSIYVKSKKSAIRVAKSITKFIECNLLLKVNREKTKISRAHESYLLGFSFYQTKGRYEIRISPKSVNRVKAKCKLITRSSDPKSETVKLTKLDSIIRGWVNYFKIANAKSIMEKLDEMIRTRLRISTWRRWKRIGTKITNLLKLGIEKSRAYMWGNTSKGACRVAHSPILKRTLEIKYFRKRGYIGFYNYWQAERQPLLF

SEQ ID NO: 2043 - protein, 459 aa, synthetic construct
  source 1..459: note = MG153-98 reverse transcriptase
MSGTRQKIQVPLAFPTAQRSEAPKRVREGTEPPTATRPPERPARTDRVMEEGVERANLKAALQRVKANKGSPGIDGMTVQQVPGYLAAHWPALREQLLRGTYQPQPVKRVEIEKPGGGVRKLGVPTVLDRFLQQAVLQVLQRDWDRTFSPHSYGFRPHRSAHKAVAQAQQYLADGCGWVVDLDVEKFFDRVNHDQRMGQGAKRITDQRMLRLLRAFLTAGVLADGLVSPTEEGTPQGGPLSPLLSNLVLDTLDREVERRGHRFVRYADDCNIYVRSQRAGQRVMASLTRFITTTLKLKVNSAKSAVAPPGERTFLGFSFTRTPQPKRRLAPSTVTRGKARVRELTRRTRGVSLERMVRQLRSYLQGWRNYFGFCQTPSVLTHLDEWIRRRLRSVAWKQWKRGRTRFAELRRRGVGLALATTTAGSAHGPWRLSHSRALDLALPKAFFATLGLPELAAGR

SEQ ID NO: 2044 - protein, 468 aa, synthetic construct
  source 1..468: note = MG153-99 reverse transcriptase
MSKKNEPSKTSANAVQTELFTGRLDSGLPKGGGTSRRDQRMELFSRLEEQRTLTKSTMDSVSDTLHLLHAFKRVRENGGSAGIDGVTPNDYAQNLALRINSLQQRLDSGTYEPSAVRGVEIEKPTGGTRLLGIPTVEDRIVQQSIQNELQRIFDPYFSENSFGFRPGRSAHQAIERASDYVKEGKIWVVDIDLKSFFDQINHDRLMNRLRNSISDKRLLKLIHKFLRAGLMKGGLETQRMSGTPQGGPLSPLLSNIVLDELDKELEARGLSFVRYADDCNILVSSERSAHRVFESMVAFIEGKLKLKVNLEKSGVRRCDEVKFLGHTVMGDGKIRIADKSIERFKKKIREVTKRNRAIPLGRLISETNLIIQGWATYFRKCNTWLSGLKEMDGWIRNRIRCYALKSHGRRYPTYCFLRSLGVETKRSWNAVKFHGWWSMANLNYVRNGMGLAWFAGLGLRSLVVVQKG

SEQ ID NO: 2045 - protein, 437 aa, synthetic construct
  source 1..437: note = MG153-100 reverse transcriptase
MSATNRTGNNKDESHKPTKLMEQIVSKENMTRAYKRVFSNKGVSGVDGLEVPELKDYLKQHWSTIKEALLAGEYYPQPVMQVLIPKPGGGERLLGIPTVIDRMIQQGIHQILNPLYDPGFSDWSYGFREGCNAQQAVAQSQIHIRSGKRWVVDMDLSKFFDEVPHDRLLSKLRKKVMDRRVIHLIDRYLRSGIMRYGVEEQRTKGTPQGSPLSPMLSNIVLNELDKELEKRGHRFVRYADDFQIYVGSKRTAERVMESLTEFIERKLKLKVNKTKSAIGRPWKRSFLGYSFTSQKESKLRVSPESIKRFKGKLKEKFRLGRGRNQQDFIVKDLNPLLRGWISYFSRSEVKGFAEILDGWVRRHLRKIKWLQMKRSWTRLQTLMKRGLSEDRAVQSCFNQRGSWWNSGASHMNKAYPRSYFDQLGLICLQNKLSGYHL

SEQ ID NO: 2046 - protein, 415 aa, synthetic construct
  source 1..415: note = MG153-101 reverse transcriptase
MKLALERGVTTMDLMNVVLSQDNIHRAYLKVKANKGASGVDNQSVDELGDYLKINGDKVINDIRTKRYFPKPVKRVYIPKANGRKRPLGISTVLDRMIQQAVAQPITDIYERVFSDYSFGFRPGRSCHDATKQALEYLNGGYEWVIDIDIEQFFDKVNHDKLIQVLREQVNDSDVLNLIRKYLKAGVMEKGLEKATKTGVPQGGPISVILSNVYLHELDKELESRGLRFVRYADDVLIFTRSEMAANRVMTSISSWLERKLFLKVNATKSKVCRPTRSKYLGFTFLKHGGQWKVKPTSKSKARLYEKMREYLKRNRAVARPLSVTFKKVNSVVRGWINYYRIGMMKGLMKINMKYRSGFSHEDIFKVANSRLGWYKRCGQSVVNFVLNPKLLEAKIKDRVGLLNPLDYYLRKVGI

SEQ ID NO: 2047 - protein, 470 aa, synthetic construct
  source 1..470: note = MG153-102 reverse transcriptase
MNVTKQKYKGRKFHNENCPQKVAAEQRGYAGVPASVRIAETSDIITDLPTDSLLKRIISRDNMNTAYFKVKSNRGAGGVDKMSVDELLPYLREHRLSLLQQIRDGKYKPNPVRRVEIPKEERGKTRKLGIPTVVDRVIQQAIAQILTPIYEPQFSEASFGFRPKRGAHDALKTCQRYADEGYVYVVDMDLEKFFDTVCQSKLIEILSRSIKDGRVISLIHKYLNAGVIRQGVFERSEQGVPQGGPLSPLLSNVMLNELDKELERRGHKFVRYADDCMILCKSRRSAERTLASIIPFIEKKLFLKVNREKTSVAHISKVKYLGYGFYRYKGKCRFKVHKKSLAKMKKRLRAITNRSKAISNEERPLILKRFVKGWVNYFKLADMKNMLRQLDEWLWRRIRAIYWKQWKKVKTRCRMIRRYNLPDWKVHELANCRKGIWRAALMLNQILTNKEIARQGYISLTSYYEQVCEN

SEQ ID NO: 2048 - protein, 467 aa, synthetic construct
  source 1..467: note = MG153-103 reverse transcriptase
MKGRKQKTPKNIGGYHQEVGAEHRGNDGVPTFVWITENNEVTPPLEDGLLGKILNPFNLNRAYLKVVRNKGSHGIDKMEVGVLRDYLRHHGSELITSINSGSYHPKPVRRVEIPKDKTSKRPLGIPTVVDRFIQQAVHQVLSPIYENQFSDNSFGFRPKRSTHKALHRCKRFISEGNKYAIDMDMEKFFDTVNHSKLIEILSRTIDDSRVLSLIHKYLNAGVVVEHKFEATERGVPQGGPLSPLLSNIILNELDKDLTRRGHRFVRYADDMVILCKSRRGAERVKESVIRFIEQRLFLKVNREKTQVVHFSRIKFLGYSFYNKKGEVRFRIHPKSIAKLRDKIRVLTSRSNGWGYSVRKERLSAFIKGWVNYFRYTDIKNLLIKIDEWYRRRLRMVIWKQWKLVRTRSRNLTKLGIPKRKAWEWANTRKGYWHVSNSYILSRSITNKNLSSAGYLFFTDYYLKVRVI

SEQ ID NO: 2049 - protein, 459 aa, synthetic construct
  source 1..459: note = MG153-104 reverse transcriptase
MRQKTQYELAFPTATKGEAPSAEGEGTEARAARADAERRTAVVGPSMEAVVERGNLKKALAQVRRNKGAPGGDAMSVDELVHHLKDHWPTIRAQLLEGTYRPQPVRRVEIPKASGGTRPLGIPTVLDRFIQQAVLQVLQAGWDPTFSEHSFGFRPGRSAHQAVARAQEYIADGHRWVVDLDLEKFFDRVNHDLLMGLVAQRVSDRRILKLIRGFLTAGVLADGLVGPTDEGTPQGGPLSPLLSNLMLDVLDRELEGRGHRFVRYADDCNIYVRSRRAGERVMASVERFLARRLKLKVNRTKSAVARPSARKFLGFSFTNREQPRRRIAPQALARFKSRVRELTQRTRSASLGRIAEDLSRYLIGWRGYFGFCQTPSVLQRLDEWIRRRLRAIAWKQWRRGPRRFAELRRRGVGKDLAAQTAGGTHGPWRISNSPALTIALPLAFFASLALASVAATIAV

SEQ ID NO: 2050 - protein, 447 aa, synthetic construct
  source 1..447: note = MG153-105 reverse transcriptase
MKKKPTMKSKMRQLNLFVDERSLFEKLCDPINLGAGFKAVKKNGGSPGIDGVTIKEFDNRLKEELVQLERDIESWNYKPSPVRRVEIPKPGKGKGVRLLGVPCTRDRVVQATIKLLLEPILDPTFSNHSYGFRPGYNQWQAVESAQRIVKSGKEYVVDIDLSKFFDRVNHDRLIYLLSGHIDDKQILRLIGMILRSGIMKDGMVTPSEEGTPQGSPLSPLLSNVVLDELDKELERRGLEFCRFADDCNIFVRTPKSAERVMRSIGKFIERKLKLRINRDKSKVGRSREVKFLGMTIIDGAVVISAQSMKRALEKVKELTPRGTHLSLSETMKRINSWYIGWSGYYRMTQYPSQLRAIEAHIRRRLRSRIVDQHTRRRHLFKKLIKRGVTRRRARTVFSNKGRWVLSNIFALTEAFPVRWFLDQAGQKIRSDDRLRHWFPIHLWIKVT

SEQ ID NO: 2051 - protein, 463 aa, synthetic construct
  source 1..463: note = MG153-106 reverse transcriptase
MDRNNEKPSCGQRARNAAKPAQKGPPASIETEEDTHNLNLYAGITLEAILEPSNLKEALKRVVANRGAPGIDGMEVGQLLDWIRNHPGQLTKAIKEGTYRPSPVKRVSIPKDEPGKFRDLGIPTVIDRLVQQATAQVLDWAYDRDFSDRSFGFRRNMRAHHALRVTAAEADQGYRWAVDMDLAKFFDTVNHSRLIRKLSLKIKDGRVISLIHKMLRSGVQINGETKPTEIGLMQGGPLSPLLANIYLDELDKELEKRGHRFARYADDLICICKSRRAAERTLASLTRFVQDKMLLKVNQEKSHVSLVTSSRTKFLGYGFYFSRAKGEVRLTIHKKSKQKLKDTIRQLLTRNPRTSIENVKQLLAQKLRGWMNYFQLADAQRWTQEVDRWIRRRIRQLLWKTWKKVKTRIKALIKLGADPARAYYWGCTRKGYWRISNSHILATTLTTDFLKRRGWSWLGCYKG

SEQ ID NO: 2052 - protein, 427 aa, synthetic construct
  source 1..427: note = MG153-107 reverse transcriptase
MVTLEAILESTNLNQAWKRVVANKGSAGVDGMEVKDLYAHLLEHGPELVQPIKEGRYKPQPVLRVLIPKEEKGKFRPLGIPTAIDRWVQQAVQQKLSEEYEKVFSESSHGFRPNRSCQTAVEQCLKLANEGYVWVVDLDLAKFFETVNHSKLLQLLSERIKDGRVISLIHKFLRAPVLEDGKSTPNTIGTPQGGPISPILANIMLNELDKKLEERGHPFVRYADDMMIFCKSRKSAERTLANIKPFIEKKLFLKLNEEKTKIRYIGSSDVKFLGFGFYAEKDGKIKDKPHQKSKDKCVKRLREITSRSRGQSLDAFRKQLSEFVRGWVNYFLRSDMAIFVRDTDKWLRRRIRQIYWKQWKKISTKYEALMRLGVSPSLAWQHANTRKSYWRTAHSWILATTLTNGFLHRKGWVCLGDVYKKRTQGSY

SEQ ID NO: 2053 - protein, 425 aa, synthetic construct
  source 1..425: note = MG153-108 reverse transcriptase
MEEQGIFIERILSNENMNRAYKQVKKNKGAAGIDGMECADLLSHLKVNGQQLRESIRNQSYKPMPVKRVEIPKADGSKRKLGIPTVTDRMVQQAAAQVLTPINERKFHENSYGFRPGKSAQKAVLKAVEYMNEGYNWVVDIDLEKFFDTVEHDKLISVLNKEIKDGKILSLIRKFLVSGVMVGEQIEETEIGTPQGGNISPLLANILLNELDWELESRGLKFARYADDCIIFVKSEKAAARVMESVTKYVENVLRLKVNRGKSKIGRPTEIQYLGFAFYYQFQEKKYKIKVPKKSLDKVMKKVRKLTSRKWGVSNSYKAQKIAEVVRGWINYFKIGSILTATRRLDTVIRYRFRMCIWKHWKNPKTRYKNLVKLGVSKKNAKSAAGFHGYVRVCRTETICYAMSNARLKKFGLLSAEEYFCQTRC

SEQ ID NO: 2054 - protein, 464 aa, synthetic construct
  source 1..464: note = MG153-109 reverse transcriptase
MKAENRGNEGFLQRESVEHQGYTEARSTDRSEGKERDGASDLLEAILDRDNLNRAYKRVKSNHGAAGIDGMSVEEALPWLKEHREELLQSIRDGSYEPSPVRRKEIPKPDGGVRKLGIPTVVDRVIQQGIAQKLQNIWEPQFSDSSYGYRPKRSGQQAIQKVKEYAEAGYRYAVSVDLSKYFDTLNHELLMNLLHRKIQDMRILRIIKKYLKSGVMENGVVSKTEEGSPQGGPLSPLLANIYLNEFDWEMHSRGVKTVRYADDIVVFAKSKRAAERLMESSRKYLEGKLKLKMNTEKSKVTSIFAVKEFKFLGFCIGRNGSGIYIRAHRKSLNKAKEKLKLLTERNRGRNVRRVMQEVKVYICGWLGYFHVADMKRTMKSWDEWLRRRFRMYIWKQWKKPRTKVANLRKLGIPADKAYQWGNSRLGYWRIAGSPVLACSITNERLAAAGYFSILNCYESLHSCD

SEQ ID NO: 2055 - protein, 427 aa, synthetic construct
  source 1..427: note = MG153-110 reverse transcriptase
MAKSHWTKAEPRGCSLIDLVCFYLDDAAQKVIKNKGAPGIDGITYEQLPNLLRVHGEKIRQKLKNGTYIPAPVRRVDIPKPNEGTRMLGIPTLLDRTIQQAIVMTIGDAFEGQFSDKSYGFREGRNCRQAVQRAQEYIKDGNRWVVEMDLSKFFDRVNHDILMDRVSRVIDDKAILKLIRRYLNAGIMEDGLVSPRLEGVPQGSPLSPLLSNIMLTDLDRELEARGLNHVRYADDCNIYVRSEKAAQRVLTNITKYVEETLKLRVNRDKSGTFRPRDSVFLGYTFSKANCTRIIVAQKSVKRLWTKLHKIFNTARGTSLGWAIKTITPVLRGWRNYYRLDDRKKYWEEMDERIRHHLRKLIWIAWKKPKTRERNLVKLGIDPERAWKSSVNGRGAWWNSGQSHMNQAIKNDRFVRLGLYSLRFMEIR

SEQ ID NO: 2056 - protein, 413 aa, synthetic construct
  source 1..413: note = MG153-111 reverse transcriptase
MITLEEVLSPENMQTACKRVIANKGAPGVDGMSVNEVRAHFEKHGASICAHIREGRYIPAAVKRVDIPKPNGGTRMLGIPTVQDRVIQQAIAQVLSKHFDPLFSEFSYGFRPGKSAHQAIEQTQKYIAEGRTWVVELDLAKFFDTVNHDRLMSKLGQHIEDKMLLRLIRRYLRTGIMADGVVQVREEGTPQGSPLSPILSLIVLDELDKYLDKRGLKYCRFADDCNCYAKSRKAAERTLENMISFIEGALKLRVNRDKSGVFRPSRAKFLGYTFVGTTGAARVHAKSLQRLRDKLKEIFFRARGTSLLKTIAKLNTVLRGWRNYFRLDERKGIFESLDIHIRRHLRKLIWIAWKKPKTRERNLVKRGLDPVQAWKSSVNGRGAWWNAGALHMRQAFDNQFFQKMGLYSLLAQA

SEQ ID NO: 2057 - protein, 477 aa, synthetic construct
  source 1..477: note = MG153-112 reverse transcriptase
MKNAENVRSCLQRDSTECEGYAGAQSAVQPGSGETAGRSQNLLEAILYRDNLNRAYKRVKANKGAPGVDGMTVEEALPWLKEHGKEMTEAIRSGKYKPTAVRRKEIPKPDGGVCKLGIPMVKDRIVQQAIAQQFMPLYEPKFSEGSYGYRPGRSAQDAIFKIRGYADEGYEWAVQLDLSKYFDTLNHEKLLNLLRETIKDERVIQLIKKFLKSGVMENGVKIATTEGSSQGGPLSPLLANVYLNEFDCEYERRGVPVIRYADDIVLLCKSQRAAERLQESSIRYLEGKLKLRVNRDKSHIARVNATKNFKFLGFAYGKGKDGLFIRAHPKALLKAKNRLRAITKRNRGVNVRKVMQEIKVYMTGWLNYYGIAFLKTKMREWDEWLRHRIRAYIWKQWKKPKTKRKNLMKLGVPEYYAHMAANSRRGYWFTVNTGAVTRGITNERLTRAGFFELSPAYESIQTACIGRAVYRTVRTVR

SEQ ID NO: 2058 - protein, 464 aa, synthetic construct
  source 1..464: note = MG153-114 reverse transcriptase
MSNSQPKLRPQQTSQEACDAENMVKPEGMHRERSAGAVRNSGETSETESLMEQVVARANMLAALRRVESNKGAPGNDGMTVAELRGYLKTNWPRIKAELLADAYKPQAVRRVEMPKPDGGIRLLGIPNVVDRLVQQALLQVFTPIFDPTFSAFSFGFRPGRSAHDAVKLARDYIEAGDEWVVDIDLAKFFDQVNHDRLMARIWRRVKDKRVLHLIRRYLQAGVMLNGVVIATEEGTPQGGPLSPLLANIMLDDLDKLLEQRGHRFCRYADDCNIYVRSQRAGERVMSSVRRFIEGRLGLKINESKSKVDRPRNRKFLGFSFFRRHGIRMRVASKSLERFKTRVREITARSNGWSMERRIYALRIYLRGWMQYFRLAETPKVYRELDSWVLHRLRLCQWKQWKRPRTRLRKLRALKLNEDDACKLAGSRRGYWPTTCGALHKAMPRRYWIERGFAGLSECFVLSV

SEQ ID NO: 2059 - protein, 435 aa, synthetic construct
  source 1..435: note = MG153-115 reverse transcriptase
MGGKRQKNQLQMVLAFAVEGRSEAPMARREGIETSTAKRECESPAIPGQVMEEVCERENCLRALKRVKSNKGSPGIDGMKVEELPGYLKQHWLAIREQLLSGNYEPQPVRRVEIPKPDGGVRKLGIPTVLDRFVQQAVMQVLQGRWDGTFSEHSHGFRPGRSAHQAVRKAQQYVAGGRRWVVDLDLEKFFDRVNHDRLMKSVALRIADKRMLRLIGAFLKAGVMENGLVSPVDEGTPQGGPLSPLLSNLVLDELDRELERRGHCFVRYADDCNIYVRSGGAGRRVMRSVTCFITRRLKLKVNESKSAVARPVERKFLGFSISNAREPKRRIAPKVLLRCKRKIRELTRRTRGISLERMTKELTSYLRGWKSYFGICETPSVLKSLDQWIRRRLRSVIQKQWKRQCPWRMANSPAMSLAFPIAYFDSLGLPRLFAG

SEQ ID NO: 2060 - protein, 444 aa, synthetic construct
  source 1..444: note = MG153-117 reverse transcriptase
MSNLSARMPTGNDVTQRIDPKPAFSKDLFEQMLLPANLQRAWRQVRANKGAAGVDGMGVDDFPAWVRSGEWDKVKAALRAGDYFPQPVRRVEIEKPEGGKRPLGIPTVNDRVIQQAIAQVLTPLFDPVFSAHSFGFRPDRNGQQAVKQVQQIIKQQRRIAVDVDLSKFFDRVNHDVLMSFVSRWVHDKRLKQLIARYLRAGYVDNQIFHETREGVPQGGPLSPLLANIMLDPLDKELERRGHKFARYADDFIILVRSQRAGERVLCSITQYLQNRLKLVINTEKSQVVKTTESKFLGFTFKNCLIQWHPKTLHKFKQRIRELTNRNWGVSMHYQLFKTSQFIRGWINYFGIANCYQLCCDLDHWIRRRVRMAYWRQWRKPRTKVRNLMRLGVHVQAAVACGITSKGPWRSSKTPGINQALSNEFLKKSGLVTLRDGWIKLHYPE

SEQ ID NO: 2061 - protein, 410 aa, synthetic construct
  source 1..410: note = MG153-118 reverse transcriptase
MKERMQKTLSQVNGCPQRDRSETEWYGGVQTFMWMCEDNIVEVPFDKEHLFEQILSPSNLNRAYKAVMRNKGCGGIDKMSCEQLLPWLLTNKDALIRSLKDGSYRPNPVKRVEMPKDNGKMRLLGIPTVVDRLVQQAINQVLTPIYENQFSNTSYGFRPRRGCHDALRGAQRIINEGYIYVVDLDLERFFDTVSHSKLIEILSRTIKDGRVVSLIHKSLRSGVMNKGLFEASEEGTPQGGPLSPLLSNIMLNELDKELERRELPFIRYADDSMIFCKSKRAAMRVKESITRFIENTLNLKVNKEKTIVSYVLGVKYLAYYHLANMKRLLHVTDEWLRRRIRMCIWKAWKKPKTKVAKLIKCGINKSQAYEWGNTRKGYWRIANSYILHRAITNEHLCRAGYVTLMDAYLE

SEQ ID NO: 2062 - protein, 470 aa, synthetic construct
  source 1..470: note = MG153-119 reverse transcriptase
MNVTESGFKNRQLHMEDYLQMVSAEQREYAEVFDYSKITEKSGVITDYWTNNLLDLILRKGNLNEAYKQVKRNKGKGGIDGMQVDELLPFLRENQETLIQEIREGRYKPNPVRRVEIPKETKGEFRKLGVPTVVDRVIQQAIAQELSPIFEEQFSENSFGFRPKRGAHDALKQCQKNVNDGYVYVVDMDLEKFFDTVCQSKLIEVLSRTIKDGRVISLIHKYLNAGVVANGKFERTEVGMPQGGPLSPLLSNIMLNELDKELERRGHRFVRYADDCMIFCKSRKSAERTLENIIPFIEGKLFLKVNRKKTEVSHISKVKYLGYTFYRYKGKCRFRVHPKSVSKMKNKIRELTDRNKGISNAEREKKYQEYVRGWVEYFRLADMKGLLKETDEWARRRIRAVYWKQWKKIKTKYRMLKALGLEHWKAKELACSRKGYWRMAKVLNQIFSNKIIARLGYTSMLDYYLVVYEN

SEQ ID NO: 2063 - protein, 433 aa, synthetic construct
  source 1..433: note = MG153-120 reverse transcriptase
MGLMELILSESNLKCAIRSVKKNKGAPGIDKMTVGELDEYFRLHGNEIRKQIFAKQYKPKPVRRVYIPKANGKQRPLGIPTVVDRVIQQAVAQVRVKGYEPRFSQYSYGFRPNRDCHMAMEQVLEYLNEGYEWVIDLDIEKYFDTVNHDKLISILRERINDATTLHLIRSFLKAGVMEDGLVSSTVVGVPQGGPLSPILSNVYLDKLDQELESRGLRFVRYADDCNIFVKSEMAADRVMKSVTSWLERKLFLKVSAEKTKVVRPTKSTFLGFTFWGSKDGWKCKPAQDRKKKLYAKIRKWLRRKNAVARPLNVTFTKLNQIIRGWINYFRIGSMKGFLEKFSQWMRHKVRVVILKQWKKPRTIYRNLMKLNKYIHANLSDESIFKVANSRLGWYRRCGGDVVNYLLSPKVLAIAQKDRPGLVDPLAYYLSRMQ

SEQ ID NO: 2064 - protein, 445 aa, synthetic construct
  source 1..445: note = MG153-121 reverse transcriptase
MSVSQRVTQNQYFIYLRKRKEETDMELLEEILNQNNLNKAYKKVVANKGVAGVDGITVEEEFDYLKENKDRIINQIRKRKYKPQPVKRVQIPKENGKMRNLGIPTVTDRIIQQAIFQVISPIFEKQFNDNSFGFRPNRSCEQAVIRALEYLNDGYEWIVDIDLEKFFDTVNQDKLITIIGKTITDGDVVSLIRKYLSAGVMEKGIVKATTVGTPQGGNLSPLLSNIMLNELDKELEARGLNFVRYADDCIILVKSEKAANRVLASITKFIEKKLGLKVNAEKSKVTRPAQTKYLGFSFWKSPKGQWKPKPHLKSYQKLVRKLKQLTDRSWSISLDNRIKKINYVARGWVNYFRIANMKNKITEIDEHLRVRIRVIIWKQWKKIRKKCESLQKLGVPFEIAFNCANTRKGYYQICKTRYIQFAINNERLRKRGLVFLLDQYEKVHI

SEQ ID NO: 2065 - protein, 430 aa, synthetic construct
  source 1..430: note = MG153-122 reverse transcriptase
MELIEKILSEDSINEAIEKVVSNKGAAGVDSMTTAEVESYYFTHGFEIITQIKNKIYKPLPVRRVYIPKPNGKKRPLGIPVVKDRVIQQSLAQALSDIYEPHFSDYSYGFRKGRSQHDAMNKVLEYLNDGYEWVIDLDIEKYFDTVNHDKLVSILRERVKDDITLHLIRSILKSGIMEDGLVSPSEEGVPQGSPVSCVLSNIYLDKFDKELEARGLRFARFADDVNIFVKSEMSAERVMKSISSWLERKLFLKVSATKTKVVRPKDSNFLGFTFVKSKDGWKCKPMDDRKKRLYSKCRAVLIRRKAVAVPLSVTFKRVNEIVRGWINYFRISSMKMFMKEFGQWLRHKIRAIILKQWKKPLRIYKNLMYMNKKQRCGFSHEDIFKVANSRKGLYARANGDVVNFILSPKILAIKSGDRPGLVNPLEYYLG

SEQ ID NO: 2066 - protein, 431 aa, synthetic construct
  source 1..431: note = MG153-123 reverse transcriptase
MRLIDEILSDSNIDRAILQVKRNKGVSGIDKMTVDELDEYFYKHRREIRYSILNKKYKPQSVKRVYIPKPNGKKRPLGIPTVVDRVIQQAVAQILMKKLDSSFCEFSYGFRPRRSAQMAVLKTLEYINEGYDWVIDLDIEAYFDTVNHDKLISILREKNVNDSTTLHLIRKFMQAGIMEDGLVKPSRVGVQQGGPLSPILSNLYLNKFDKELENRGLRFVRYADDCNIFVKSEMSANRVMKSVTSWLERKLFLKVSATKTKVVRPPESKFLGFTYLKRYGEWKCKPSNQSKMKIYDKCRRELIRRIGIARPLAVTFKRINQIVVGWINYYRIGVMKYFIDVFGQWLRHKIRVIILKQWKRPKTIYKNLYKMNRLFSCQFSDEQIFSVANSRRRLYSQACGHVINNIISPKFLGKRIGDRPGLVNPLNYYLS

SEQ ID NO: 2067 - protein, 443 aa, synthetic construct
  source 1..443: note = MG153-124 reverse transcriptase
MEQDNPDSAAKATQGGDAAGGQPRTWWWAEASIWTDRMMSALGNGVKGGKWFSLVDKAIRPTTLEAAWRKVERNKGAAGVDGQSIERFAAGAERYLAELHENLKNGSYRPSPIKRVDIPKGGGQTRPLGIPTIKDRIVQTALKMTIEPIFEVQFRPGSYGFRPGRSCKDALREVDRLLKEGYTHVVDADLKSYFDTIPHDRLMARVGETISDGRVLKLIDGFLKQEIMSDMARWLPTTGTPQGAVLSPMLANIYLHPLDLLMEQSGRRMVRYADDFVILCRTEDEARAALRDVDAWTTANGLTLHPDKTRIVDSRQPGQGFDFLGYRFEAGRRFVRDKSLRAFKDKVRAKTVRSRGDSLARIIADLNPALRGWFGYFKHAAPFQLRYLDRFVRRRLRAVLRKQDKRPGFGRCKADHQRWPNAFFADQGLFTLTTALAHARHSR

SEQ ID NO: 2068 - protein, 438 aa, synthetic construct
  source 1..438: note = MG153-125 reverse transcriptase
MIEQVLNQRNIMQAYRQVVSNKGSAGVDGMSVKELYVHLTNNREQIESDIRAGKYLPQAIKGVEIPKGNGKVRLLGVPTVTDRLLQQAVGQVLAIKFEMVFEDNSYGFRPNRNAQQAVLKAQEYINSGYHHIVDIDLKSFFDEVDHGILLQLLYRKVKCPLTLRLIRKWLRAPILINGKLIKRRKGVPQGSPLSPLLPNIMLNELDKELEKQGLRYVRYADDFSIYTKSNTAARKIGNSIFLFLKDKLKLPINREKSGIRKPVNFKVLGYGFVPTYRKGEKGKYQLVANEKSWKSLKEKLKTITRKTTPMSFDERIQKLKEVTQGWLNYFRMASIHGKLKELDGWPRNRLRYCIWHHWKKPERKRKNLIQLGVDPEHAYQWSRTRMGGWATAQSPILVTTITLERLRERGYEALLTYYEKIAPHLNEPLYTRTVRTVV

SEQ ID NO: 2069 - protein, 466 aa, synthetic construct
  source 1..466: note = MG153-126 reverse transcriptase
MTTGAAEGRVEMPGAKPEVGGRKPLVSGDGAANVTGRTDHSGPETERLMETVLSRGNMMTALSRVVANKGAPGVDNMPVTDLKGYLHEHWPRIKEELLGGKYRPQPVLKVEIPKPGGGKRMLGIPTVLDRLIQQAVHQVLSLKFDSDFSANSYGFRPGRNAHQAVQAARQYVAEGRRWVVDMDLEKFFDRVNHEILMSLVKRKVKDRMVLKLIDSYLKAGMLDGGVVSPRQEDTPQGGPLSPLLSNILLDELDKELERRGHAFCRYADDCNIYVATKASGERVMASITRFLSQRLKLTVNQAKSAVDRPWKRTFLGYTMNWYPRPRLRVGAVAVSRFRANVRKVCRRGRGRSLPQVINELNPKVRGWLNYFRHIESDYLLKELDGWLRRKLRVIIWKQWKRTRTRAKNLIKPGLSSGASWRFARKQRGPWVAAGENVMNRLLNNAYFESLGLVSLQNQYHRLQRVS

SEQ ID NO: 2070 - protein, 444 aa, synthetic construct
  source 1..444: note = MG153-127 reverse transcriptase
MEDKPSKVPATAPQGGDIRARWAWVEPAVWTDPMLTALEQGVRGGKWFRLIDKVFSEKNLLASHRKVEANRGAPGVDHVTIEEFSQQLGPNLENLTAALRGGSYMPQAIRRVFIPKPGGREQRPLGIPTVRDRVVQGAVRHVLEPIFEREFAEQSYGFRPGRGCKDALRRVDHLLKNGFEHVVDVDLKSYFDTIPHGRLMNRVRERVADGRVLDLVEAFLKAGIMNGLEETEPEMGAPQGAVLSPLLSNIYLNPLDHLMVSKDFEMVRYADDFVILCRSREEAEQALAIVRQWCEAEGLTVHPTKTKVVHVRNEGFDFLGYHFQATQRGRLTRWPREKSLMKLRDTIRSKTRRTNGNSLECVILDLNRSLRGWFGYFKHSCRQSLRQIDMWIRGRLRTLLRKRSKRSGFACGEDQKRYRNAFFEELGLFNLTAAHGLEGQSSRG

SEQ ID NO: 2071 - protein, 443 aa, synthetic construct
  source 1..443: note = MG153-128 reverse transcriptase
MDDILDKILMPENIRAAIDEVRKNKGAPGIDKMPVDELMGFFALNESAVIRQILNKEYKPQPVRRVYIPKPNSDKLRPLGIPTVIDRVVQQMVARVFTREYDPPFSPHSYGFRPNRDCHKAMAEALEYLNEGRTWIIDFDIEKYFDTVNHDKLISILRENVNDAVILHLIRSFLKAGVMDDGLVSPTEEGVPQGGPLSPVLSNIYLDKLDKELEARGLAFVRYADDFVIFARSRKSAERVMKSVTSWIERKLFLKVSPTKTHIVPPSKSEFLGFGFWKNGSEWKCKPLASRKSRLWDKLRAVTCRRKAAAIPLSVTVNKVNEIMRGWINYYRIGNMKGFMDLTGQWIRHRIRVIMVKQWKKPKTIQKNLRWYCAVFHLNFSDEDLYKVANSRKGLYAQCNGDVINYILSPKVLSMKLTIGKGRNSRAVYPGLVNPLAYYLGTT

SEQ ID NO: 2072 - protein, 470 aa, synthetic construct
  source 1..470: note = MG153-129 reverse transcriptase
MKERMQNESRKLGQSESRVEPKAMTGLQTSMGIIENGLTEFTRPKDGLLEFILSPVNLNAAYKKVKGNKGSGGIDGMSTEYLLPYLKEHGSELVASLREGTYKPNPVRRVEIPKANGKKRGLGIPTVVDRVVQQAVSQVLEVLYEPQFSETSYGFRPRRGTHKALLKCGEYIEQGYVFTVDMDLEKFFDTVSHSKLIEVLSRSVKDGRVVSLIHRYLNAGVVNRGKYEPSSLGVPQGGPLSPMLSNIMLNELDKELEHRGHKFVRYADDLVIFCKSRKAAQRTYEHIVPFIEGKLYLKVNREKTKVAYMRDIKFLSYAFGRRNGKCQYRLHPESISKMKDKIRELTSRSNGWGYEYRKQRLTWYIRGWSNYFSLAGYKNRLEEWDSWLRHRIRMCIWKQWKRVRTRYHNLQKLVPDENRVRTAAFSRKSYWRMASHPVVHEAMSDERLKKAGYPTFAEYYVDFNKARGYY

SEQ ID NO: 2073 - protein, 424 aa, synthetic construct
  source 1..424: note = MG153-130 reverse transcriptase
MSEMLEKILSDENIRLAKKRVYANKGAGGVDEVTVQELDDYMAQNWEDIKQQIRERRYRPQPVLRVEIPKPNGGVRKLGIPTVVDRTIEQAITQVLSPIFEQLFSDHSYGFRPNRSCEQAIRKLLEYFNEDYTWIVDIDLEKFFDNVPQDKLMSYVGRVIHDGDTESLIRKNLKAGVMVRGKYESTKVGTPQGGNLSPLLSNIMLNELDKELEKRELRFTRYADDCVIVVKSEASAKRVMYSITSWIERKLGLKVNATKTQITRPMKLKYLGFGFWKSKEGWRTRPHQDSVSKFKRTIKKLCKRSWSVSLTYRLGKLNAVVRGWINYFALGDMISAITRIDKHLMVQMRVIIWKQWKVPKKREWGLKKLGVKPWIAHEQSHIKGYMKAVRLPQIKKAISKEKLTKRGLVSPLEYYLRQHTLKLN

SEQ ID NO: 2074 - protein, 432 aa, synthetic construct
  source 1..432: note = MG153-131 reverse transcriptase
MSLIEEILSNENLNEAIKRVKANKGASGTDKMTTDMLEPYFYEHRKEIIESIMNKTYKPQPVRRVYIPKSNGKLRPLGIPTVVDRVIQQAIAQKLVPIYENVFSEYSYGFRPNRDCHMAINKVLEYLNSGFEWVIDLDIEKYFDTVNHDKLISILREQVNDSHTLHLIRKFLQAGVMDNGLVSSTTIGVPQGGPLSPILSNIYLDKFDKELEARGLHFVRYADDCNIFVRSDVSAERVMKSVTSWLERKLFLKVSATKTKITRPTNSNFLGFTFLKNSDKWRCKPGKDRKAKLYEKVKVVLKRKHAVSRPLATTFTKLNQIIRGWINYFRIGSMRNFIDEFGQWLRHKVRTIIIKQWKKPKRIYVNLKVINDLFKCNFSHEDIFKVANTRLGWYKRAGMNVVNYILSPKVLELANKKKGRPGLVNPLAYYLK

SEQ ID NO: 2075 - protein, 464 aa, synthetic construct
  source 1..464: note = MG153-132 reverse transcriptase
MKKAEYPGNEGCPQRDSAEHEEYAGARSADRRETEETDGADLLERILDRGNLNRAYKRVKANKGAPGIDGMTVEDALPWLREHREELLDQIRNGKYKPQPVRRKEIPKPDGGIRKLGIPTVVDRVIQQAIAQQLTPIYEPLFSDGSYGYRPGRSAQMAIQKVKEYAEQGYTTAVLIDLSKYFDTLNHDLLMNMVREEVHDKRVIELIKRFLKSGVMENGLHIKTEEGSPQGGPLSPLLANIYLNKFDHEMESRGVHVIRYADDIVVLARTPRAGERLLESSRRYLEGKLKLKMNMDKSRVVSVYSKRNFKFLGFALGKGKDGVFIRAHAKSLKKAKQKLKELTSRSQGRNVRVVMYKVKVFIRGWLGYFYIASMRNTMKSWDEWLRRRFRMYIWKQWKKPRTRMRYLMKLGVPDWRACAVAYSRKAYWRCAKHASVNEAISSKRLAQAGYYSILDRYESLHLCD

SEQ ID NO: 2076 - protein, 433 aa, synthetic construct
  source 1..433: note = MG153-133 reverse transcriptase
MTHVQLDFSNITLERILSPDNLLEALKRVEANKGAPGVDGMRTDELRDYIRQHPGELTSVVRSGRYKPSPVKRVTIPKAEKGKFRDLGIPTVIDRLVQQAVAQILTIYYDETFSDASCGFRPGRGAHDAIYKCVARTAEGFVWAVDMDLAKFFDTVNHSRLIRKLSTRIKDKRVISLIHRMLKSGIDTGKEIIPSEVGLMQGGPLSPILANIYLDELDKEFEKRKLVHIRYADDVICLCRSKRAAERVLESISRFLERRMLLKINREKSGVNHITRGIKFLGYGFYRAGKKGILPTVHYKSKRRFTETIKTVLSRNPKRSIEAVKEELRTKLMGWTAYFQLACYEVWRQRTDQWIRRRIRQLLWKCWKRVRTRYRALRMLGCSHEEACEWANTRKSYWRVADSHILATTLTNDFLKSHGWTWLALSCKTVGWE

SEQ ID NO: 2077 - protein, 469 aa, synthetic construct
  source 1..469: note = MG153-134 reverse transcriptase
MKTTESDKLKHRQLTVWDYLRRDTAEQEEQAGVCVSPRMDETDTTNQPEQKELLEQILAPENFDKAVKRVKANRGAGGSDGMSVHELDAWLEGHQEKLLERLRGGKYHPQPVLRVEIPKDNGKTRKLGIPTVVDRAIQQAISQVLSPIYEQQFSDRSYGFRPGRSAHDALRQCLDYITEGYRWVVDMDLEKFFDTVNQSKLIQVLSNTVKDGRVVSLIHKYLRAGIMVNGMFEGSKEGVPQGGPLSPLLGNIMLNESDQELERRGHRFVRYADDMVIFCKSRKAAERTLVSITKFIEGKLFLKVNREKTTVAYVGKIKFLGHGFYVDKDGGQLRVHPQRVEKFKAKVRKITGRSNGWSIQGRKARLNALIRGWVNYFKLARMKGLLQKLDGWIRRRLRMVTWKRWKRVRSRFTNLMKAGISKWWAWQWANTRRGYWAIAGSVILTGAIPNALLTKAGYLTLSECYAKVM

SEQ ID NO: 2078 - protein, 417 aa, synthetic construct
  source 1..417: note = MG153-135 reverse transcriptase
MGQLMNQILSRENMKMAYKKVKANKGAGGIDGISIEDVNKYLKENWIDIKTKILKRKYKPQPVLRVEIPKPNGGVRNLGIPTVVDRIIEEAIAQILTPMFEPQFSEHSYGFRPGRRAQQAIVELLEYLNDGYTYIVDIDLEKFFDNVPQDKLMYLVGKTVKDPDVISLVTKYLRAGVMVKGKYEETTIGTPQGGNLSPLLSNIMLNELDKELEARGLHFVRYADDCIITVASSAAANRVMHTVTSWIERKLSLKVNATKSKVTKPTGLKYLGFGFVKMNGKWEARPHKDSINRFKKKLKKLTYRSWSVSMDYRILRLNQVIRGWINYFRIGKMKQNMTKIDKHLRNRMRIVIWKQWKTSKKRMWGLRKLGVPEWMARQSVGFADHYQAVAKTAGLRRITKEILAKRGLISCLDYYLN

SEQ ID NO: 2079 - protein, 461 aa, synthetic construct
  source 1..461: note = MG153-136 reverse transcriptase
MGEKRQNNQLELAFMAEMRSEAPKTAAEGTETSIAKRTPEDPALPVLLMEEIVERENLLKALRRVSRNKGGPGIDGMTVGKLPGYLKKHWPRIRGQLLAGTYQPEPVKRVEIPKADGGMRKLGIPTVLDRFVQQAIMQVLQKYWDRTFTEHSYGFRPGRSAHQAVYQAQQYVEQGYRWVVDIDLERFFDRVNHDKLMGKLAKRIHDKRLLKVVRTFLNAGVMEDGLVSPSTQGTPQGGPLSPLLSNIYLDELDRELQRRGHRFVRYADDCNIYVRSERAGKRVMESISKFIAGKLKLKVNQSKSKVDRTWRCKFLGFRLLPGKRIKRGIAPSSVLRFKSRVRRLTRRNRSVKLQQIIEQLNLYIRGWRGYFGFCQTPSVLGNLDCWIRRRLRCIVWKQWKRGTRRFAALRSMDINKSLAARTAGSVHGPWRVSRSPALSFALSNGYFDSLGLVHLTELGTA

SEQ ID NO: 2080 - protein, 448 aa, synthetic construct
  source 1..448: note = MG153-137 reverse transcriptase
MLPRHLVRIVNPNGGVVYKRIVEEQFSNDQLLERILSTENVGLAWKKVRANKGAPGIDGITIEEFPFTFRECWPEIRSTILEGHYVPSPVQRVEIPKPDGSTRPLGIPTVLDRVIQQAVAQVMGPISDPWFSESSCGFRPRRSAHDGIKQIKRYIRKGYKVSVDMDLSKFFDTVNHDVLMHRVARRIEDKRVLKLIGKYLRAGVMVKGRRLATPLGVPQGWPLSPLLANILLDDLDRELENRGHHFVRYADDFIIMVKSLSAGQRVMGSIHRFLERELRLTVNEKKSKVGPAEECGFLGFVFVRGKIRWSDKAFREFKRRIRLFTGRSWFVSMEYRLLKLAEYVRGWMNYYGISEYYRPIPEIDEWLRRRLRMCFWKQWRYTRTKVYNLLKLGTSKRQAIMTALSRKGPWHLARPLATQVGMTNKWLKEQGLISVKDQWVKIHYPASA

SEQ ID NO: 2081 - protein, 489 aa, synthetic construct
  source 1..489: note = MG153-138 reverse transcriptase
MSKVKKTANPGKINRDLPEEDGAELRSTLGESSFASALPDEKDRITMDTSKLLEKVIDRNNLNLAFKRVKKNGGSHGVDGMKVEELLPHLKQHGEQIKRDLLEGKYRPQPVRRVEIPKPNGGGVRLLGIPAVVDRMLQQAIAQVLTPIFEKEFSDYSYGFRPGKSAHDAIKQAQVYLNEGYTTVVDIDLENFFDRVNHDKLMYLLSKRISDKRLLKLIRRYLESGVMVGGLVSPSREGTVQGGPLSPLLSNVMLHELDMELEKRGHRFCRYADDCNCYVKSRRAGERVMSSISEFIEQRLKLKVNRDKSAVDYVNRRKFLGFSFYRAKGEYRIRVDAKSLKRLKDKLRLLTYRSNGWSIDARIYRLNQVIRGWVNYFSLADMRSHCLLLDEWLRRRLGMCYWKQWKKVKTKHTNLVKLGIPVWKAWEYANSRKGYWHIANSWIMHRSLTNAYLEKAGLHSLSYVYFNLNLTNRRMPNGTYGGVRGQQVN

SEQ ID NO: 2082 - protein, 457 aa, synthetic construct
  source 1..457: note = MG153-139 reverse transcriptase
MGSEKTQPKRAGTGQNSGETGIGASSLSASMGRSGAEVAEMMERVVESSNMRKAYWRVVGNKGSAGVDGMTVAELKGHLQANWAILKERLLAGTYIPSPVLRVEIPKPGGKGLRPLGIPTVTDRVIQQALHQVMVPLWDKEFSGYSYGFRAGRSAHQAIRQSREYVAEGRRWVVDMDLEKFFDRVNHNILMDRVARKVRDKRVLKLIRRYLKAGILVGGVVEVPQQGTPQGGPLSPLLSNILLDDLDKELERRGHAFCRYADDCNIYVRSRKAGERVLSSISRYLEEELKLKVNKEKSAVDRPWRRTFLGYTMTWHKEPRLRVGPEAIRRLKGKVRKLAASGRGRSLRYTISLLTPLLRGWYNYFSLAQVRNIFEELDGWIRRRLRCILWRQWKRSFTRARNLMKRGLSEERSWRSATNGRGPWWNSGASHMNRAYPKSYFDCLGLYSFLDHHVVTS

SEQ ID NO: 2083 - protein, 444 aa, synthetic construct
  source 1..444: note = MG153-140 reverse transcriptase
MIENENKTVGVSYGTKQTEETRLWDWVERSIWTDRMLEALETGVKGGVWFSLIDKVYRPQTLYAAWKAVKRNRGSAGTDHESIERFEQKLEENIKKLSEELRTGTYYPRPIKRRYIDKPGSKEKRPLGIPAVRDRVVQTTIRLVIEPIFERQFRDYSYGFRPKRGCKDALREVEKRLKAGYSHVVDADLKTYFDSIPHDRLMQDVQRYIADGRVLKLIKNFLKQDVLDGLAQWTPEAGTPQGAVISPMLANLYLHPVDQAMEEAGFIMIRYADDFVIMCKDEKEAKQAMCKVSQLITERGLVLHPEKTCIVNTNEAGQGFDFLGYHFERGTRWPRKKSLKKLKDTIRSQTGRSNGHSMAVITANLNRTLRGWFEYFKHSHKWTFRILDGWIRRRLRSILRKRNKGAKGISGKMDHFRWPNKFFQELGLYSLEEAHDLLFQSSRR

SEQ ID NO: 2084 - protein, 467 aa, synthetic construct
  source 1..467: note = MG153-141 reverse transcriptase
MKVSQNNQRLQKTKYLGSSAEDRVELEDKQRVHRKFSATTNGGTNEFQYGSLERILSINNVVSAMKRVIANKGSHGVDGMTVYELKQFLNMNWSNIRENILNGEYKPMPVRRVEIPKPNGGTRLLGIPTVLDRVIQQAIAQELNNIYDKKFSQNSFGFRPRRDAKGAIKKAESYINEGYRWVVDIDLEKFFDKVNHDILMYKLSMDINDKRVLKLIRRYLQSGIMINGVVVTNEEGTPQGGPLSPLLSNIMLDELDKELEKRGHRFCRYADDCNIYVKSKRAGERVMENITTFIEDKLKLKVNKDKSAVERPWKRKFLGFTLNLMFGKAYSSISKQSLKRHKEKLRNILSRSKPIPLEQRINKLNQVNIGWVNYYGIAKCKGILGQLDTWIRQRLRMCIWKQWKKVRTRYRNLKKLGLTHYQAIKFANTRKGYWRIANSAILNITLTNQFFTDLGLKSLTRQYIKIH

SEQ ID NO: 2085 - protein, 317 aa, synthetic construct
  source 1..317: note = MG157-6 reverse transcriptase
MLDYLGLPRISSLRDLSAEINLSEYTLFLMSRNTDLYYKEVAVPKKNGGTRLLACPSSEIKAIQAWILRNILEKISVSRYATAFKKDVNVLHNARIHIGNLYVLCMDIEDFFGSIKANKVYSFFIKLGYSRQAALLFTKFCTYKGCLPQGGVTSPALSNILNRDLDTKISNVCKSLNVFYTRYADDLTFSSNNLKKLREIRNNIEEILNSEGYRVNTKKTRLRWPGTRREITGLIYSDNNSEVRIGKRTKKILRAKIHHLESGLEKNEDRYYKLFYHLVGWMSYLHSVDLKTYNQLLRYWNSLNSNNAFVAVSRSFD

SEQ ID NO: 2086 - protein, 291 aa, synthetic construct
  source 1..291: note = MG157-8 reverse transcriptase
MTTLENIAQRVGVNTNYLSRMKINSDKLYKAYYQRKSSGKLRRIEAPNKHLKAVQRWILRNILKDVPISDFAHGFSKGRSIKSNARYHLQKKYILVLDLKDFFPSITEGMVSRAFTEIVHDPQMSAIYTKFCTYKGRLPQGGATSPALSNIIFRSVDEKIVNICGRMNIAYSRYADDMTFSSNDLMSLRQLHNKLVPIIESDGYVLNNEKTRYLSGKGKMVVTGITLNSGRMTTGRDRKRKIRAALYNLIVRKDTTVKMNEVSGTVAFMRDIEPGYYLKLKEYIKSINNKT

SEQ ID NO: 2087 - protein, 295 aa, synthetic construct
  source 1..295: note = MG157-9 reverse transcriptase
MTYSDFHLRLGIPESVLRRLVENKDKCYNTYHVPKKSGGQRQIDAPNVELKGVQLWVLRNLLESVELHPAATAFVKKRSIRHNADAHIGKKFILTLDIKDFFPSIVETTVFQVFNKIVDNDELANMLARLCTFRGYLPQGAVTSPTLSNISFRTVDDLISGRAAELGVSYTRYADDMTFSSNVRERLDELGPIVAGYLKDAGYVVNHKKTRLVSSGKALEVTGLYLNSGRPTVGRILKRKVRSLLFRYIYHGDRTVSKSTIYGYLSFIRGIEPDFEASVRAYLQKVRDKKDRRPP

SEQ ID NO: 2088 - protein, 324 aa, synthetic construct
  source 1..324: note = MG157-10 reverse transcriptase
MEASPRKSRLRTFRLPEIQNLTEFSNQIRLSESAIKKYITFAEHYYFTYGIPKKTGGERLIAQPSRELKAIQSWLLRNILDKLPSSASSKGFELGTSIYNNASPHIGSNVILSFDIDNFFPSIPANKVYGVFCSCGYNKRISSAFTSICTFKGFLPQGSPASPKLANLVCLNLDSRIQGYAGKHGITYTRYADDITLSCHSIKKIEKAKTFIPTVIKDEGFKLNKQKTRLMGLRKRKSVTGLVVNLNKAGVGREVYREMRVKIHRLFIDEADNYSHINGWLSFIYGIDDEIYNKLYVYIKNLSEKYPFSDAINNLLAKPPRIIP

SEQ ID NO: 2089 - protein, 303 aa, synthetic construct
  source 1..303: note = MG157-11 reverse transcriptase
VIEANQELYTQRLLALPIIQNIEDLSTRTRLPVSLISQYLGDNSRYYFNIHHKKKTGGIRSINSPNRQLKALQRWILKNILEKLKPSRYAKGFIPKLNLLDNAQPHAGNQYVLKIDLKDFFPTIEANKVYSIFRAVGYSKKISYYLTSICTLKGYLPQGAPSSPYLSNLVCLRIDHRIGRYCDKYALIYTRYADDISISGNQLSSIKKSWLIIKMIISEEGFIINKNKELLSGPRSSRTVTGLVTNPAVGIGRKKYNHYRKEIFNLKRNDSTLHIEKITGILSFVKSVDIKRYEQLKKYYETI

SEQ ID NO: 2090 - protein, 309 aa, synthetic construct
  source 1..309: note = MG157-12 reverse transcriptase
MTTKIKSRGLYTQRYFALPELKTASDLAREIRLSELVLFKYFSNNSKYYHSYKIKKKSGSFRVISAPFVELKAIQRWILRNILDKLNTSPYAKGFIKGKKLIENAIPHTNKQYILNIDLKDFFDNIPASHVFSIFHALGYSPLLSYQLAKICTKNGVLPQGAPTSPSLSNLVCSRLDYRIGKYCEKNALSYTRYADDLTISGNKLDIMKTAKQTILKIIKDEGFIVNFNKLKLVGPGLKREVTGLVVNNILGIGRVKLNEYRLRIFNLYKSNDPLAKAITDGIISYVASVDKPRSDKLRILHDKLQSHS

SEQ ID NO: 2091 - protein, 291 aa, synthetic construct
  source 1..291: note = MG157-13 reverse transcriptase
MKKLQDIAQEMGVNKSYLSLISRNHNKCYQSYYLGKNGRAKRVIDAPNSELKAIQRWILRNVLENQPLKPCVHGFRARHGIKTNARRHLGKPFIMCLDIKDFFPSIKRGRVFSIFHDIFNDKNTADVLSNLCTYKERLPQGGVTSPALSNIVLDKADERILGICSRKRVIYTRYADDLSFSANYVSYLEELKPEIDKILGEDGFELNEKKSRFLRGKGRMLVTGLVLNSGKLTVGRSRKREVRAALFNYIVKKDKKVNVNKLVGTLAFIRDIEPDFYEKFLEYRSRLRART

SEQ ID NO: 2092 - protein, 298 aa, synthetic construct
  source 1..298: note = MG157-14 reverse transcriptase
MVQTIQDLDNLAILLGVPKFIVTKYIFQADSFYKVFRIRKRSGRGYRIISAPSSELKGIQRWISVFILRKIPLPDECMGFRIKHSICDNASPHVKKDFVLHLDIKDFFPTITTPRVIGLFKSLGYTREVAFGLGKLTTYQHKLPQGAPSSPSISNIICRKLDYRIKCFCDKRGWSYTRYCDDMTISGMGHMPSINIITKIIRDEGFEINQRKTSLMRRNTCQRVTGLVVNEGVNISKHRKKIWRAIFHQAGLTPDKFYSRRAELLGYIEFLKMVCSTEDPSIATYTDIIKKLDCIKSI

SEQ ID NO: 2093 - protein, 417 aa, synthetic construct
  source 1..417: note = MG165-10 reverse transcriptase
MHATNKPFNIEKRWVYEAYKAVKSNRGAAGVDEQTIEQFDADLSGNLYKIWNRMSSGTYFPPPVRAVAIPKKSGGERILGVPTVADRVAQTVAKMVIEPILDPIFLADSYGYRPKKSALDAVGATRERCWKYDWVLEFDIKGLFDNIDHELLLRAVRKHITCKWALLYIERWLKAPMVQEDGTMIERSRGTPQGGVVSPILANLFMHYTFDLWMARTHPDLPWCRYADDGLVHCRTGHEAEALKAELQVRLAECHLEMHPTKTKVVYCKDGKRKGKYPNVKFDFLGYCFRPRLVRNFRDNSLFGGFNPAVSPSAMKVMRQAVRDLNIRRQTQLSLQDIAQKLNPLLRGWIAYYGRYAPSALYPLLRYVNQRLVAWAMRKFKRFKRHKVQASQFLERLATECVDIFVHWQIGMTGVFA

SEQ ID NO: 2094 - protein, 406 aa, synthetic construct
  source 1..406: note = MG165-11 reverse transcriptase
MIDYYETRSQPITRKMVWQAYQKVKSNKGSFGVDKMDWVTLDGNVNSHLYKLWNRLSSGSYFPEPVREVAIKKKSGGVRKLGIPTLLDRIAQEVVKTHLERIVEPQFHHSSFGYRPNRNCHQAVEKATQNAFTHCWAIDLDIKSFFDTIDHSLLMKAVEHYCTDKWVRLYVHRWLRAGIVQQDGCYVDRTSGTPQGGVISPLLANIFLHVTFDKWMEQHHERKPFERYADDIVVHCKTERQSKFLLKEIRQRFSQCKLSVHEGKTKIVNIRGSSEKKYKMSFDFLGFTIQPHFVKVKGNVKRILPRSIISKKSVSSVLDKFKGIHKRRVSIEELARELNPVIRGVMNYYCKFWTYHTHEMWAQLNEKLKKWVKWEKRLYKMASVRWLQQKYVNHSNLFAHWKLVRP

SEQ ID NO: 2095 - protein, 424 aa, synthetic construct
  source 1..424: note = MG165-12 reverse transcriptase
MTQNKKKSYEISKYAVYQAYLKVKEKRGSAGVDNVDWKTFEGRLQDNLYKIWNRMSSGCYFPKAVKRVEIPKKDDGSKRPLGIPTIADRIAQMVVKDRLEGTLEKIFHPNSYGYRPNKSCGDALEAARRMCWTKAWVIDVDIKGFFENIDHDLMMKAVYHVTGCKWAVLYIERWLKGTVSIDGKIENPSKGTPQGGVISPLLANLYLHYAFDMWMERYFESIAFERYADDIVIHFSSEQQAKMIWYSLVKRMKECGLELHPDKTKIVYCRDGNKGKSRKASSFDVLGFTFKLRQTVDKRGKRFIGFNPSISKSGKKSIMDKVKGWSLNKRVGLNLSYIAKRVNPQIRGWKNYYGQFRSYDLMGIWLYIDRKIMKWAMKKYKGLRKSSKKTWNWLLGIVRSKPYLFEHWRYLHKSFLLSGRSRMN

SEQ ID NO: 2096 - protein, 416 aa, synthetic construct
  source 1..416: note = MG165-13 reverse transcriptase
MDKAKPFCIPKRWVWEAYKRVKANRGAAGVDEQSVAEFEVNLKGNLYKLWNRLSSGSYFPPPVKRVEIAKRDGGTRPLGIPTVTDRIARAVVKAYLEPAVEKHFHPDSYGYRPGKSALDAVGVARERCWRHAWVLDLDIRAYFDTIPHDLLLRAVRAHTDCAWVLLYIERWLKAPAQLDDGTLVPRERGTPQGSVVSPLLANLFLHDVFDRWMDKYHPNIPFERFADDVLCHCVSEAQARWLKGVLERRFAECGLELHPQKTKIVYCKDDDRRGHYPNETFDYLGYTFRARRSKNRWGKYFVNFSPAVSNAAAKRMRQAIRDWQLGCRVDKGIDDLARMFNPIIRGWLTYYGRYYPSALYPTLRYLDGRLARWAQAKYKRLRRHRRRSEHRVRAIAHRAPGLFAHWRLLHRAAAGR

SEQ ID NO: 2097 - protein, 414 aa, synthetic construct
  source 1..414: note = MG165-14 reverse transcriptase
MEEGKSFKISKHRVLEAYKRVKANRGAAGIDEISLTEFEKDLKDNLYKIWNRMSAGSYFPPAVKAVEIPKKSGGKRILGVPTVADRIAQMTVKLYFEEMVEPHFHQDSYGYRPGKSALDAVAITRKRCWNYDWVLEFDIKGLFDNIDHELLMKAVRKHTSSKWIILYIERWLKAPFQMAGGTVVQRTAGTPQGGVVSPVLANLFLHYAFDKWMDRNAPENPFARYADDGVVHCRTLKEAEELLVRLGQRFEECKLELHPDKTRIVYCKDDRRNGKHPETKFDFLGYTFRSRLSKNNQGKYFVGFNPAASKSACQNLRDRIREIRFKNKIVTIEELAALMNPVIRGWLNYFSKFRASDARRELIFVNFALTRWIRRRHKKAGKSLKKAYRILGLTAKTNPNLFYHWSLGLQPTIG

SEQ ID NO: 2098 - protein, 419 aa, synthetic construct
  source 1..419: note = MG165-15 reverse transcriptase
MIFVEEQKTQPITRLQVLEAFKRVRANGGSAGVDGITTAQVEGNKRKYLYPLWNRMASGSYYPKPVRQSLIPKANGKKRALGIPTVMDRVAQQVIATELEHDIDNRFSRNSFGYRPNRSAHDAVGQCRINCMKYSWVIDLDIKGFFDNIDHELLMKGLRYYTSKKHILLYCERWLKAPVQLPDGTLKPSEGRGTPQGGVISPILANIFLDIVFDKWMEKHYPDVAFERYADDIVVHCQHFKQALRLLEAIKQRMKDCKLELNREKSKIVYCRRNQKNQPPFKVHYQKFDFLGFTFKPRISMMNGKLKLGFSPAISSRNIARISDEIFKRKIHRWVHFPLSKIAELLNPQIRGWVNYYSRFRKSELRKLFRVINMRLVKWIRNKYRKFRHRHWYNAYKYLWGIAQRYPYLFVHWQFGYLP

SEQ ID NO: 2099 - protein, 415 aa, synthetic construct
  source 1..415: note = MG165-16 reverse transcriptase
MQTTKSYTISKQTVLEAYKRVRAKRGCAGVDEEMISDFESNLKDNLYKIWNRMSSGSYFPPAVKVVEIPKSNGKTRSLGIPTVSDRIAQMVAKMYLEPKVDRVFHEDSYGYRPNKSAIEALGVTRKRCWEYDWVLDADIKGFFDNIDHELMMRAVRKHTSCKWVLLYIERWLKSPAINVEGTQVKRDKGTPQGGVISPLLANLFLHYAFDEWMKRNYPNNPFERYADDIVVHCSTESGSESLKKAVEPRLKHCRLELNLEKTKIIYCKDDRRRGEYPLRKFDFLGYTFRSRRVKSGKGEYFVGFNPAVSNDAKKLLRKKVKHLVIQYRNKAKLEDLSEIINPVLRGWVNYFGKYRRTEILFTLYGVNETLVWWARKKYKRLKASHGRAYRWVGRIAKQEPSLFVHWSMGCGPVIE

SEQ ID NO: 2100 - protein, 415 aa, synthetic construct
  source 1..415: note = MG165-17 reverse transcriptase
MDKTKPYDIPKQTVWDAFQRVKANKGAAGVDEETIGEFEKDLKGNLYKIWNRMSSGSYFPPAVKAVEIPKKSGGVRILGIPTVSDRVAQMVVKLHFEPKVEPIFAADSYGYRPGKSATDALRITRGRCWRYDWVIELDIRKLFDRIDHELLMKAVRKHTDSAWEILYIERWLKAPFQMQNGSKVERTMGTPQGGVVSPVLANLFMHYAFDEWMRREHPNNPWARYADDAVIHCRTQKEAKSLLIDLGERFKQCKLELNTEKTRIVYCKDDDRKGNYSLTSFDFLGYTFRPRRSKNRWGKCFINFSPAVSNSASKAMRQTIRGWRMQLKSDVGIDDLSRMFNPVVRGWINYYGCFYKSQLYSVLRHMNRALMYWARRKYKKLAVHKRRASSWLGRLARNRPELFAHWQMGILPTVG

SEQ ID NO: 2101 - protein, 416 aa, synthetic construct
  source 1..416: note = MG165-18 reverse transcriptase
MSATKPFSIPKELVWRAYKLVKANRGGSGVDRQSLEDFESKLKDNLYKLWNRMSSGSYMPPPVKAVPIPKKSGGERILGVPTVADRIAQMVVKLVFEPEVEPVFLPDSYGYRPGKSALDAVGVTRERCRRWDWVLEFDIVGLFDNIPHDLLLKAVRKHTDVRWVQLYIERWLRAPMVYPDGRREARCRGTPQGGVVSPVLANLFMHYAFDAWMARAHATNPWCRYADDGLVHCMSERQALVLRASLQSRLAECGLEMHPDKTRIVYCQDDRRKVDYPRKQFDFLGYTFRARVVRLSQPTRFFVSFSPAVSKASSKAMRAYIRRSAIRNWTNLSLDDIARGFNPAIRGWLQYYGRYRRSELYPVLRHFNLTLVAWAMAKFKRFRRSRTRASRWLIQLSKRDPCLFAHWKVGMAGSFI

SEQ ID NO: 2102 - protein, 420 aa, synthetic construct
  source 1..420: note = MG165-19 reverse transcriptase
MKQDDPRPKAKPFEIPKLLIYNAWKCVAANKGAPGVDKESIKAYQSNLGGNLYKLWNRMSSGSYHPQPVRQVLIPKGDGFRSLGIPTVADRTAQMAVKMILEPRLEQIFHPSSYGYRPGRGAKDAVAQVRRNCWRYDWVLDMDIKAFFDTIDHELMMRAVEKHVPEKWIRIYIRRWLECPIQLEKGELQSRSCGTPQGGVISPLLANLYMHYAFDHWMRLNNPGILFARYADDVVCHCRTRREAEILLEYLKERLENCKLQLHPVKTKLVYCKDNKRKGTYPLTRFDFLGFSFHGRTVQDRKGNLFTGFNPGVSRKSLKRMNESLRSLKINRNTRSTLPDLAEQINPMVRGWIAYYGAFYPEPLKKFLIRIELRLGRWARNKYKRLRGHKRRSWNWLKRYRATAPRMFVHWDYLFMKGHG

SEQ ID NO: 2103 - protein, 418 aa, synthetic construct
  source 1..418: note = MG165-20 reverse transcriptase
MTRVAEAKSFDIAKREVWEAYKRVKANPGAAGGDGVTIAMFEQDLSKNLYRIWNRMASGSYLPPPVKRVDIPKGDGKTRPLGIPTVADRIAQMVVQRRLEPLLEPVFHANSYGYRPRRSAHDALRVARNQCWRHDWVLDLDIKGFFDNIDHDLMMKAVRRHTDCRWAVLYIERWLKADVLMPDGMLTTRDKGTPQGGVISPLLANLFLHYAFDQWMVRHHPKVPFERYADDIICHCDSQAEATSLRAELEARLAACRLELHPEKTRVVYCADANRRGEHPDRRFDFLGYTFKPRQAMNRRGRLFTSFSPAVGDKAGKAMRHEIRGWGLQRLNRYDLDELLARIRPVLVGWVRYYGLFHPSSLQRALKPLDHDLVRWAQRKYKKLRGRYMRAWDWLRALRQRAPTFFPHWSAAIMTTER

SEQ ID NO: 2104 - protein, 415 aa, synthetic construct
  source 1..415: note = MG165-21 reverse transcriptase
MPKRKDKPFVIPKQMVWEAYQRVAANKGAPGVDRETLEEFETDLAGNLYKIWNRMSSGSYFPPPIRAVEIPKPHDDGVRKLGVPTVADRIAQTVVAKYLEPTVEQKFHPDSYGYRPGKSALDAIETCRRRCWKHDWVIDFDVQKFFDEVPWDLVIKAVEAVTDCRWVLLYVKRWLAAPWQRSDGTLAERDKGTPQGSAVSPVLANLFMHYAFDMWMSRNFPGSPFERYADDAVVHCNSRRQAELVLDQIAARMREVGLRLHPDKTKIVYCKDSNRRREHRHITFTFLGFSFRPRGAVNKRRGGMFTSFLPAISPEALKAKGDRLRELRIQRRTDLSLDDLARWLNPIVAGWMNYYGRYYRSALYPLLWRVSFYLRRWAGKKYKRLRTYKRFKRWWMGVLEREPCLFAHWQWVRSP

SEQ ID NO: 2105 - protein, 414 aa, synthetic construct
  source 1..414: note = MG165-22 reverse transcriptase
MQEAKPYSISKKAVIAAYQKVKANKGTYGVDEQSIEDFERKLNNNLYKIWNRMSSSTYFPQPVKAVVIPKKNGGTRILGIPTVEDRIAQMVAKLYFEPNVEPIFYEDSYGYRPNKSAIQALEVTRMRCWRKDWVLEFDIRGLFDNIRHDYLMEMVKRHTQEKWILLYIERWLRAPFQMEDGTIVERTSGTPQGGVISPVLANLFLHYVFDDFMEKEFPTIPWARYADDGIAHCVSLKQAKYLKRRLEQRFRDYGLELNLEKTRIVYCKDDDRRGSHENTSFDFLGYTFRPRHAKNRYGKFFTNFLPAISEKAKKSIRKEVRGWKLQLKPDKDLYDIANMFNRKIQGWINYYTHFYKSEIYDVLRYINGCLVKWVRRKYKKRGARRRAEHWLGEVAKRDRNLFAHWKFGILPSAG

SEQ ID NO: 2106 - protein, 439 aa, synthetic construct
  source 1..439: note = MG165-23 reverse transcriptase
MRWRCLGNGMDQLGNEDEPVTNLKPYDIPKRRVLEAYRRVKANRGAAGIDGESLEMFEADLTGNLYKLWNRLSSGSYFPPPVKQVEIPKKNGGVRVLGVPTIADRVAQQIVVARIGGDLYGVFHPDSHGYQLDKSAVEAVANTRKRCWEYDWVVEFDIRRAFDELDWDLLRKAIAKHIKDPWCLLYIERWLTASAVSPDGQTVQRTKGVPQGSVVGPVLMNLFMTYAFDEWMKREHPANPFSRYADDAVAHCRSEAEAKQLLAAIEERLKECKLELHPEKSGIVYCKDSNRRKEYPKTSFTFLGYEFRPRSAKSRDGRTWTSFQPAISASAMKRIRQAIREWNLPRQTSVSLNELARQYNTQIRGWMNYYSHFYQSALYRLYDHIDQKLVRWAQRKYRKLAGKPTWARAWLKKVVGRQPRLFVHWLAHGKVAVRTMGAV

SEQ ID NO: 2107 - protein, 424 aa, synthetic construct
  source 1..424: note = MG165-24 reverse transcriptase
MKAAKSFEIRKRQVWEAYQLVKANRGSAGIDQVTLKEFEKDLSGNLYKIWNRMSSGSYIPSPVKLVEIPKADGKKRPLGIPTIADRVAQMVAVQILGPSIDPHFHENSYGYRPGKSAHQALEVAKEQCRKHRWVIDLDVSKFFDTIDHGLMMKALIRHTNTKWILLYVERWLTCPYELKDGSQIARNQGVPQGSVIGPLLSNLFLHYVFDQWMRKTYPEIPFERYADDIVCHCPTQVSSSKVLSAIDHRFSTCGLSINKDKTKIVYCKDSNRNERWGEIQFDFLGHTFRPRAVKSKIGEYFTGFNPAMSNNAKKKICEKINSWDVNQWVGWALTLEDIADKINPIIRGWINYYGKFYPSLLRKHLRHVDLRLALWARTKFKRLKRHKRKSIHWLGVIAKSNPNLFAHWQWGYKPSAGVIYPAGD

SEQ ID NO: 2108 - protein, 418 aa, synthetic construct
  source 1..418: note = MG165-25 reverse transcriptase
MEELKSSGKPFDISKTEVWDAWIKVKGNQGASGVDGQSLTAFEKDLKNNLYRIWNRMSSGTYFPPPVKAVEIAKAHGVGTRMLGVPTVGDRVAQTVVAAHLGARVEPVFHPDSYGYRPERSALDAVGACRKRCWEYDWVIDLDIRKFFDSVRWDLIVKAVEKHTDARWVVLYVKRWLAADQQLPDGSLQGRDRGTPQGSAVSPVLANLFMHYAFDVWLTREFPTVAFERYADDAVIHCITRAHANKVLGALHQRMAEVGLELHPDKTKIVYCKDSNRRGDFEHTSFTFLGFTFRPRQARRRDGIKFTSFLPAISKEALKKIGARVRSWRLHRHTGSSTADLARMINPVVRGWMAYYGAFYRTALYPVLHRINTYLLRWIMKKYRKLRTWKKAIQSMSNAAANQPRHFAHWTWAKPATR

SEQ ID NO: 2109 - protein, 415 aa, synthetic construct
  source 1..415: note = MG165-26 reverse transcriptase
MEEERTKSFPVSKRMVYESYLKVVSKNGGAGIDRESIEMFNANMSKNLYKIYNRMASGSYLPPAVRTVFIPKKQGGFRPLGVPTVADRIAQGVVKDYLEPEMDKLFHGSSFGYRPGRSAHDALGQCHANCLQYAWVIDVDIKGFFDNISHEKLMELLKRHTQQRWVLLYVERWLKAGIEQEDGSIIERTKGTPQGGVISPLLANLYLHHAFDKWMEQSKVNNPFERYADDIVIHCCSKEEAEKLLAALEERMSEYSLTLHPEKTKVVYCKNYRRNEDYDQNSFTFLSYTFRPRAAKDKFDPKKLIVLFNGAISNAAKTSIRKAIRKVLNPKWVNGTLEGLANVLNPKIRGWINYYGKFFKWRMIKVFHYLDGLIQRWLANKHRFTSKAKTIETFQRIKEEFPVMFYHWKFGIKQD

SEQ ID NO: 2110 - protein, 417 aa, synthetic construct
  source 1..417: note = MG165-27 reverse transcriptase
MSETKPFSIRKQWVLEAYLKVKSNKGSGGVDGISLKEFGEQYKKYLYKLWNQMSSGSYLPPPVRLKEIAKKDGGVRPLGIPTVADRIGQTVVKELLEPVLEPLFHEDSYGYRPGKSAVDAVAKARVRCWKQAWVIDLDIKGFFDNIPHDLLMKAVRRHCDCKWMILYIERWLVAPLQLEDGTIIARTKGVPQGSVIGPILANLYLHYCMDIWLARKHPHCPFERYADDAIIHCSTEQEGLRVMKALEERLQQCGLQLHPMKTKLVYCRDSNRKGTYPNVTFDFLGYTFKPRQAQNSIRKETFTNWLPAVSTKAMKSMNEKMHGWKVLQQTGNTIQEIALKINPVLRGWINYYGKFYKTKLKDFMHIVNVKLASWARRKYKHLRTSEMKAIRWLHGISLRRPGLFAHWSLLGSKPTVG

SEQ ID NO: 2111 - protein, 416 aa, synthetic construct
  source 1..416: note = MG165-28 reverse transcriptase
MNLWNETKSIPISRPMVWEAYKKVRSNQGSAGIDQISMDEFDAERSKHMYKLWNRMASGSYFPPPVKEVGIPKKDSKIRKLGIPTIGDRVAQMVVKEYLEPRFEQIFSPQSYGYRPNRNAHQALESVRSNCKKTDWVIDLDIKGFFDNIDHGKLLLAIEKHVSEKWCILYIERWLQMPVQTKSGELIHKQGKGTPQGGVISPLLANLFQHYAMDKWLEQTHPTVSYVRYADDAILHCRKKAQAEEVLKTLKERMQGCRLELHPEKTKLVYCRDYRRQENHETVKFDFLGYSFQPRSTMSKRTGKLFLGFDCAISIGSKKRIADKMKELNIDHLSHKSIVGVALYLEPFIRGWINYYGRFRLWALKSIFQLLRKRLIMWALKRYKRYKTNLNKAYEWLKRVKEQFPNLFYQWKLGFS

SEQ ID NO: 2112 - protein, 417 aa, synthetic construct
  source 1..417: note = MG165-29 reverse transcriptase
MSEPRPKTAKPFDISKWAVLEAYQRVKANQGAAGVDGQSIEEFEENLKGNLYKLWNRLSSGSYFPPPVRAVEIPKKSGGQRTLGVPTVSDRIAQTAVRLYLEPEVEPLFHPDSYGYRPGRSALDAVGRCRGRCWKYDWVIDLDLRSFFDSIPHDLLMKAVSKHTDQRFVLLYIERWLVAPLEKADGSLVERDRGTPQGSAISPLLANLFLHYAFDTWMAREFSGCPFERYADDAVIHCASEAEAQMVLDALARRLAQVGLELHPDKTRIVYCKDANRKGSFEHEQFTFLGYTFRPRLTKNKRGQFFVSFLPAMSDDAGKAIRQEIRRWRLNVHSDKSLGDLASFVNPIVRGWCRYYGRFYKSRVYRSLGRINDYLVRWARRKFKRLRTSVRRAWRWLRGVQRRSPELLAHWAFGALA

SEQ ID NO: 2113 - protein, 467 aa, synthetic construct
  source 1..467: note = MG166-6 reverse transcriptase
MMPPKETRCAEGRGRPEGELRENARVRTQSRVALRSNLARVNEAARKDKSARFTALLHHADVSALERAFHRLKRSAAPGVDGETVASYEQELAQNLERLHAQIHSGRYQPQPVRRVYIPKADGGRRPLGVTALEDKIIQGAVAEVLSAIYEVDFLGLSYGFRPGRSPHQALGALHTALMTQEVSWVLDADVRSFFDSVDHEWMLRMVAHRIADRRILRLIRRWLRAGVMEGQRWSETVQGTPQGSGISPLLANIFMHYALDLWVHQWRKRYARGRVIIVRYCDDFVMGFQYEADARRMLADLKECLAKFKLALHEEKTRLIEFGKRASELRRKCGARRCETFRFLGFTHYCAWSRGGRFVVKRRTERMRLTRKLKELGIQARRRMHTPVVLQYQWLCSVLRGHYAYFGLPSNWDRLGAFYQETRRIWHRALNRRSQRRLSWERYVRLLERFPLPVPRITHPRPVAAC

SEQ ID NO: 2114 - protein, 492 aa, synthetic construct
  source 1..492: note = MG166-7 reverse transcriptase
MMHGLEKSDSSIRAKKSANKPGRPGAESMEQREGTKENTGESPASRTLSREIVTGGLDRVRQAARGNKKERFTALMHHVTIDLLRQAYYWLKRSAAPGVDGVTWHDYEDNLEAKLTDLHTRVHRGSYHPMPSRRKYIAKPDGRKRPLGIAALEDKIIQRAVVEVLNAIYEQDFLGFSYGFRPGRGQHDALDALAVGISQRHVNWILDADIAAFFDTVSHDWMLRFLEHRIGDRRLLRLIGKWLKAGVMEEGVVSATETGTPQGAVVSPALANVYLHYVFDLWAHRWRQQQARGAVIFVRYADDVVAGFEHEGEARRFLVELRQRMEKFALSMHPTKTRLIEFGRYAAERRGKRGLGKPATFNFLGFTHIAGRTQKGRFQLIRKTRRDRMRAKLKAIKEELRRRMHHSIPQQGQWLRQVVRGYFAYHAVPTNLQSLSAFRYFVGRLWLKTLRRRSQKNRFSRDRLTRLAADWLPSPRILHPWPDARFVVKHPR

SEQ ID NO: 2115 - protein, 432 aa, synthetic construct
  source 1..432: note = MG166-8 reverse transcriptase
MSTQLDQIVGKAKSDSKCRFTSLAHLITPGFLKETWKQMNRRGASGVDGETMQEFERDLDRRVRCLGERLRQGTYRAPPVRRVDIPKGPGKEGTRPLGIPTVEDRLLQRAVARILEAVFEADFLDCSYGFRPGRNPHGALRALRGIVVTKKVGHLFEADIRGYFNHIQHDWLLKMVAHRIGDPVILRLIGKWLNAGFMVGGVVTRTEEGSPQGGPISPILANIYLHYVLDLWFEKTVKPRCKGEVYLTRFADDFVVNFQYQRDAERFRKGLTNRFTKFGLELAEEKTRLMRFGRFVRTDREKTGEKPETFDFLGFKHVCGVGQGGKFALVRIPCVKSCRKFLAKSKEWLKRHMHWKRRDQRRQLVTMLRGFYQYFGLHHCKPKLDHVRREVQRQWRHSLRRRSQRHCMYWSYLKSRSWFDLPYAGSTRHGTV

SEQ ID NO: 2116 - protein, 433 aa, synthetic construct
  source 1..433: note = MG166-9 reverse transcriptase
METKLIRIQQLSAQNHNMVFTSLFHMINKDLLKECHRRLDGNKAMGMDEVSKDEYERNLDENLDKLIQSLKTHSYKPKPALRVYIPKANGKKRPLSISCYEDKLVQYALKCVLEAVFEPLFLENMYGFRPEKGCHDALKALTNTIEKQQVAMVLDADIRGFFDNLDHEWIIKMVKVHIKDPNIIWLLRKILKAGYIEDGQKHETMRGAGQGSLCSPIIANIFMHYVMNLWYWKKIKPVLKGSSNIIIYADDFVGCFQYKNDARRFYEILRERMTEYGLELEPTKTRLIEFGRFAEQNAKAKGKKAEIFRFLGFIHYCGISQNGRFRVKRKADSKKFNAKVAEMKKWLQQNRSKRLKEMIPMINRKLLGHYHYFGITDNFYGIKRFYEIVHNMLYKWLNRRSQKRSYNYKQYEAMLKVYPLAKPKIYVNIYEAV

SEQ ID NO: 2117 - protein, 498 aa, synthetic construct
  source 1..498: note = MG166-10 reverse transcriptase
MNADGKSDGTVVPSTQANKAETESAAESVEGRDRPAKRNVSESDLLRTPSRAKRRSLGLAGVRETARTNPELKFTALLHHVNEDLLTSAFFDLKKTAAVGIDEVTWYDYEQGLEERIADLHGRIHRGAYRAKPSKRIYIPKPDGRQRPIGIASLEDKIVQKATVWVLQCIYEQDFLGFSYGYRPGQSQHKALDALTVALTSKKVNWVLDADVEGFFDTIDHSWLIKFLEHRIGDSRVLRLIRKWLRAGISDDGEWSETRMGTPQGAVISPLLANVYLHYVFDLWIQWWRSKRSRGDIVVIRFADDFVVGFEHKYEAEACLAEMRERFAKFGLRLNDKKTRLIEFGRYAAARRKARGLSRPETFDFLGFTHRCGVTRRHGWFAIHRETVAGRLRATLAAIKAKLIHRRHWELGAVGGWLARVMRGWLGYHAVPGNMPRLQQFRDEIAKLWLAVLRQRSQRHRWPWSRMQTLVRRFLPTPRIIHPYPDQRFRARLEAGAV

SEQ ID NO: 2118 - protein, 502 aa, synthetic construct
  source 1..502: note = MG166-11 reverse transcriptase
MMNGRGKSDSLVVPAKPSNRGGSTAAPPAEGVEERRLAKGNPRKHDRPRAQTRLDLQSALERVREAAVRDRELRFTNLWFHVCEVERLREAYLALKRDAAPGIDGVTWREYGRSLEENLRDLSARLKSGAYRAKPVKRVYIPKPDGRQRPLGVTALEDKLAQRATVEVLSAVYETDFLGFSYGFRPGRSAHQALDALAVGIQTRPVNWVLDADIRGFFDAIDHECLMGLVERRIVDVRATRHIRKWLNAGVLEKGKLEVQEAGTPQGSSLSPLLANIYLHYAFDLWANEWRRERARGTVTIVRYADDFLVGFEHRDEAERFLAELRERLAGFHLELHPEKTRIVAFGRRADDEWRGGSGPKPGTFDFLGFTHTCDRTRTAGRFIVLRQTMRKRLTAKLAAMKQWLRKHLHDPVPLVGAHLERVIRGHVQYYGVPRNGPALRAFIKGLARLWYMALRRRSQKTRMTWNRMYRLLRAHFPPPRIVHPYPEQRFAVMTRGKSPVR

SEQ ID NO: 2119 - protein, 520 aa, synthetic construct
  source 1..520: note = MG166-12 reverse transcriptase
MHENRETLETPVAEPGNRPAGEGKSRTARMNVSEESHSGVVPMNHSNKNGRPLAESEEGRPLIKENARQPNTYPTQSGESVSQGLAGVRKAARENKEMKFTALLHHLTVDLLRESFYSLRRKAAPGVDGVTWQEYEVGREERLTDLHGRVHRGAFRALPSRRVYIEKEDGRQRPLGIAALEDKIVQQAVVTTLNQIYEEDFLGFSYGFRPRRSQHDALDALSYALLKRKVNYVLDADIRGFFDNLDHSWLIKFVEHRVADPRILRLIQKWLKAGVMEEGKWSEAKTGSPQGSVISPLLANIYLHYAFDLWVNVWRQKWAQGEVVVVRYADDTIVGFQYQTDADRFLENLRERLARFGLELHPDKTRRIEFGRFAEQNRKRRGEDKPETFDFLGFKHISAKNGIGRFTVRRTTIRKRMRAKLRQIKQELRARMHDPVPRTGEWLKSVVQGYFNYYAVPGNLESLAVFRDRTLGLWWRRLCRRSQKRRISWTRMLSLGKRWLPQPRVLHPYPADRFAASHPR

SEQ ID NO: 2120 - protein, 461 aa, synthetic construct
  source 1..461: note = MG166-13 reverse transcriptase
MERRGTHSTACSMETLPTLRGGTTAIPGVERIAQRARQQPETCFSTLMHHFSVDNLRVCFESLDGKKAVGIDGVTKEQYGEALEDNLQRLHQKLHQLSYRPQAVRRVEIPKEDGSTRPLGISCLEDKIIQAMTRRILEAIYEPTFLDTSYGFRAGRSCHDALRQLNLEMMRRPVNWVADLDLARFFDTLPHQEILSVLALRIKDRKFLQLIARMLKAGVQTPGGVVVDELGSPQGSIVSPVIANIFLDHVLDQWFSQVVRQHCRGYCSIIRYADDTMVLFEREDDAHRLMRVLPLRLAKFGLTLNQAKTQLLRFGKQAAWQAIKSGHKLPTLDFLGFTHYWGRSRTGKVRLKRKTSKKRLRRALVDLKQWLRQERNARKLPQLWQAIGSKMRGHFNYFGVTDNSRALYQFERAVHELLFKWLNRRSQRRSFTWDRFLRYMARYPLPQPGRLVSLLPVLSVE

SEQ ID NO: 2121 - protein, 498 aa, synthetic construct
  source 1..498: note = MG166-14 reverse transcriptase
MTYDHGKSDRLVVPQKPPNNAGRPAAEAVEGSERAKGNSPEGHDDRTQRRMQSSDGIERVRQAARKDRKRRFTALLHHVYDVARLRAAYLALKRDAAAGIDGETWRHYGEALGANLQDLAARVKRGAFRASPVRRAYIPKTDRRQRPLGVPTLEDKIVQRAVVEVLNAIYEQDVLGFAYGFRPKRSPHQALDARTVGIETKRVNWVLDADIQGFFDTLNHEWLVRFLEHRVADRRVVRLIQKWLRAGVLEEGVRTRSEVGTVQGGSISPLLANVYLHYVFDLWVQRWRQREAHGDVVVVRFADDFVVGFEHREEAARFLADLRERFARFGLTLHPDKTRLIEFGRYADRNRRDRGDGKPETFNFLGFTHACSKTRKGRFTVLRQTMRRRWQAKLREVKTELRQRLHDPIPEQGAYLRSVIMGHTRYYGVPRNGPSLTAFHAALARLWRVTLMRRSQTAFVSWERMRRLLARWLPVPHICHPYPNQRLAFATQGTSRMR

SEQ ID NO: 2122 - protein, 492 aa, synthetic construct
  source 1..492: note = MG166-15 reverse transcriptase
MTNGPGKSDRPVVPEKSSNNAGQPAAEGTEGRGLAKGNLPQQNASRTPSRSNAPSALERVRQAAGKDKKLRFTALLHHIYNLETLRMAYFSLKKEAAPGVDGETWRPYGEKLDENLQDLSERLKRGAYRAKPVRRVYIAKTDGRKRPLGVPVLEDKIVQRAAVEVMNAIYETDFLGFSYGFRPGRSQHQALDALYTGLLTRKVNWVLDLDIKGFFDGLSHEWLVKFVEHRIADRRVVRLIQKWLNAGVLEDGKRIRVEEGTPQGGSASPLLANVYLHYVFDLWVQAWRQKRAHGDVIVVRFADDIVVGFRDKQDADQFRAELTERMKKFNLELHPEKTRLLEFGPFAINNRRARGEGKPETFNFLGFTHICVKKRSNGRYTVLRQTIRKRLQAKLNEVKAELQRRMHEPIPEVGKWLQAVVRGHIRYYGVPMNQPALFLFRFQVGRLWYRALSRRSQNGRVLWDRMRRLITRWLPLPLVCHPYPLRRMGVLI

SEQ ID NO: 2123 - protein, 438 aa, synthetic construct
  source 1..438: note = MG166-16 reverse transcriptase
METKLARIAEIARANPKEQFTSLAHLINAEMIKACHKQMDKNKAVGIDGINKAEYEANLEENIKDLIARMKRQAYKPQSVKRVYIPKPGTDKKRPLGLPAYEDKLVQIALAKILNAIYEQDFLECSFGFRPHRSCHDALKVLNVIVNKSEINYIVDADIRGFFDHVDHEWMMKFIKHRIADPNIQRLISRFLKAGIMEAGISYATPEGVPQGGPGSPILANIYLHYVLDLWFEKRIRRQCKGASYMVRYADDTVFCFQYENEAKEFYQQLVMRLKEFNLEIADEKTKIINLGKNRDNDDDSDTGSFDFLGFTHYADKTDNGQTLIKRKTSKKKYKASLLKVKEWLKKNRHSPTKELMKMMKIKLYGYCRYYGVTNNRNAVSDFIDETKRLIFKWLNRRSQRKSFDWSRFNLFLKKYPLPRAYTCVNIFELGAGKSYVM

SEQ ID NO: 2124 - protein, 441 aa, synthetic construct
  source 1..441: note = MG166-17 reverse transcriptase
MGTDLKRIGERARKEPGLVFTSLYHHICDVDNLRTCYDKLEANKATGVDGVTKKEYGINHEENLQNLSQRLKQMGYKPKPKRRSYIPKEGSEKGRPLGISCFEDKIVEEATKRTLEPIYETIFKNSSYGYRPLQNQHKCLDALGQTIQQKKINYIVEADIRGFFDTVNHKWMIKFLKYRIGDERLTRLIIRMLKGGLMEDGLFYETREGTQQGSILSPLLANIYLHYVLDIWFAGRVRKQSSGKAYYFRYADDYVACFQYKDDAESFQEQMKNRLKGFGLEPAEEKTRCIEFGRFARVDAYKQGEKPEEFTFLGFTHYCGKTREGYFKVKRKTSRKKLGQSLHRFTDWARNMRNILKKGEMLKQARNKVLGHLDYYAITDNLERCKFYVRRAAQILFKWLNRKSQRRAYTWERFNKALAWIKWPEARLRKDLNPCRRAEAI

SEQ ID NO: 2125 - protein, 458 aa, synthetic construct
  source 1..458: note = MG166-18 reverse transcriptase
MKVHGAKDRNTVTFLEGKHVENTGGYKDMQTKRQDIRTLSKRHPKLETLMYRVDKESLLRQHRLQKKDKAPGIDMVTKEVYQENLNENIDDLIHRLKSFSYKPQPVRRVEIDKGNGKKRPLGIPVYEDRLFQGAMADILSDVYEPRFLDCSYGFRPKRSTHDAIKVINDTIMYKKVNYILDCDIKGFFDNVNHEWLMKFLRNDIADPNYLRYIARMLKSGVMIEGKYEDTSVGTPQGGLISPILANVYLHYVLDLWFEKCIKKQLCGEAYLVRFADDFLIMFQYERDAQRVYEAVIKRMELFGLELSKEKTRILPFGRYSDSRETFDFLGFTHFNSKTRKGYYSVGHKISRKKKKQFKSNLKKWVKENRNTQFDEFMKALNKKLTGSFNYYSLSGMIKEVRNLWQHSLYVTFKWLNRRSQRRSFKLERFYDIWNDRIIHPYIHVDIWSGDKVIYNKNV

SEQ ID NO: 2126 - protein, 432 aa, synthetic construct
  source 1..432: note = MG166-19 reverse transcriptase
MGTKLERIMEISATTPKPEFTSLYHLINIEMLKQCHKELDGSKAVGIDKVTKAEYEEHLEDNLTNLVSKLKNKAYKPLPSLRVFIPKANGKKRPLGIASYEDKIVQLAVKKILEAIYEPRFLNCMYGFRPNRGCHDAIKEVQYQINKRCINYVVDADIRGFFDHMSHEWMMEFLRLYIKDPNLLWLINKYLKAGVLTDGVFEESEEGSAQGNIISPILANIYMHNVLTLWYKFVITGRTTGHSFLAVYADDFIAGFQHKEDAKSYYALLKERLRKFNLELEESKSRMIEFGRYAESNSKRKYGRKPETFDFLGFTFYCGKGRKTGNFCVKLKTSRKKFSMKLKQTKEWLYQNNDLPVKELIAKLNKKLVGHYRYYGVSHNMNKLSSFLHYVQRYLFKVLNRRSHKKSYLWNGYIDMLKVYPLAQPKIYVRLF

SEQ ID NO: 2127 - protein, 501 aa, synthetic construct
  source 1..501: note = MG166-20 reverse transcriptase
MKTNNQNSNRQTSRKSDKVIVPMKQANKTGKSSAEFVEERTLIKRNIHTVSSGCTQRQRTTTSKLMNVREIAKKDKHAQFNSLYHLINIDLLIKSFDSLDRSSATGIDKISWLDYSKNIVENLKSLKEEISNGSYKPKPARIKCIPKADGSDRKISILCLRDKIVQQAVVLILENIYEEDFLGFSYGFRKGRCQHDALDALSVGIYRKKINWVLDLDISKFFDQVDHDWLIRFLQHRIQDKRIIRLITKWLKVGHLDEKGRHHRSGVGTPQGSVISPLLSNIYLHYVYDLWCNKWREKVCSGDMIVIRYADDSVAAFQNQGEANKFLVDLKVRLKKFGLKLHEDKTKLIRFGRYASRECKKHKLGKPKTFDFLGFTHICGFTQKGYFTIVRKSIKKRLLARLKVLRKEIFKRRHRPVRETARWLCSVIRGHINYFAIHGNLNSVYLYIFEISKSWYRSLCRRSQRKRLNWTKFQKYLEPLLPRVKIMHEYPSIRFDAKYSR

SEQ ID NO: 2128 - protein, 464 aa, synthetic construct
  source 1..464: note = MG166-21 reverse transcriptase
MSRKWGSETRATHGREGEAGHNVLTGRKMKDTQKSPLISTDLRQIAAQAKQDPAMIFTSLAHRMDIDFLTEAYHRVRKDGATGLSGVTSKEYKQNLIHNLTDLHQRLKNQTYVAPKIKRVWIDKGNGKKRPIGITEFEDKIAQKAVAMLLGAVYEQDFYDYSHGFREGHSAHQALHDIRSHCMGSNIKWVIDADISGFFDNIDRAKLIEIIKLRVNDGGLIRLIGKWLNAGVVDGEVLSYSDKGTPQGGVISPVLANIYLHHVLDEWFTNEVQPRMKGQCFITRFADDFIIGCQVETDARKIMEVIPKRFDRFGLSIHPEKTKLFSFAKPASDKEVRKGENTLDFLGFTHYWARSRTGSWVIKRKTSKNKLRKSIVAMREWCRNNRHKPLKWQYQMLCSKLRGHFQYFSVRCNMRSMESVRYFVIRGWQYWLSRRSHKSAIPWVQFRQLLEAFPLPTPKIVHNV

SEQ ID NO: 2129 - protein, 432 aa, synthetic construct
  source 1..432: note = MG166-22 reverse transcriptase
MGTKLERIADKSAREKRPIFTSLYHLLNEELLLQCHRELDGKKAVGVDGVTKAEYSTNLVVNIKALVIKLKNKSYKPRPVLRVYIPKGNGKQRPLGLAAYEDKIVQLGLKKILEAVYEPKFKGNMYGFRPHRNCHMAIKSMCTDLIRNRINYVVDADIKGFFNHMNHDWVMEFVKYYIHDPNILWLIKKYLKAGVMEAGEYKTDEEGSAQGNIISPMLANIYMHHVLILWFKAYYEKRGKGGCFLVVYADDYVAGFENKWEAEDYYRQMQDRLNKFGLEIETSKSRLLEFGRYAKERRKRRGEGKPETFDFLGFTFYCGANKQGKFCVIPRTSSKKFRAKVKALKDWLRTRLTKPLKLTMETLNRKLIGHYRYYGMTYNIQMLVKFHYHATNMLFCIMNRRSQKRSYNWEEFRRMLEYYPLAKPKRYVNLYE

SEQ ID NO: 2130 - protein, 438 aa, synthetic construct
  source 1..438: note = MG166-23 reverse transcriptase
METKLIRIAEIAKEKPKDVFTSLYHLLNTKLLTQCHNELAGNKARGIDGVTKLEYSTNLEENIQSLVERLKKHSYKPQAVRRVYIPKGDGKKKRPLGIPAYEDKIVQSGLNKILQAIYEPSFSKNSYGFRPERSCHQAIVKLNSIIEHKKINYIVDADIKGFFNNVDHEWIIKFIDLRIKDPNIIKLIKKFLKAGVMEEGIIQKTNVGMPQGSIISPILSNIYLHYVLDLWFEVKIRRQSTGEARIVRYADDYVCCFQYEKDAKLFYEKLKDRLAKFNLEIEESKTKIIMFGRFAEERCKINKQNIVPTFDFLGFTHYCSKSKNGKFRVKRRTSKKKFREKLKNFKVWIKAVRNLYKLQKIFEVAKLKLRGHYRYYGITDNSPMLKEFKYQIEGLLFKWLNRRSQRKSFDRYKFNLYLKLNPLPTPKIYVNIYNNAVF

SEQ ID NO: 2131 - protein, 451 aa, synthetic construct
  source 1..451: note = MG166-24 reverse transcriptase
MIRNYADKRELENMVNELLGIQYNIAKANRTDRKVQNLASYINEDTLRAIHKTMDKGKAYGTDKVTKEEYERNLDENLANLVKRMKGGSYRPNPTRRVYIPKETKGRMRPLGISCYEDKLVENAVAQILEQIYEPKFYDESFGFRPNRNCHQAVREIIEMVQYRKTNYVVEADIRGFFDNVDHEWLMKMLSHDIADRRFLEIIEKLLKAGIMEDGRYLDSERGTPQGNGASPILANIYLHYVLDNWFDVIVKRQCEGECYLIRYCDDFVCCFQNRYEAGVFRQRLEERFRKYGLELAEEKTKILEFGRFARQNRKARGEGKPDTFDFLGFTFYCGMDRKKQFYRCRVKTSKKKFRSKMKAMKEWIKAHRTMPLEMLFKTINAKLRGHYQYYGVTDNTREVKNFLMQTKWLLLKWLNRRSQGRSYTVDTFFNGLLRTFPLIEPKIKVSLFYR

SEQ ID NO: 2132 - protein, 427 aa, synthetic construct
  source 1..427: note = MG166-25 reverse transcriptase
MVQTSLEAIAKKAEQCRKHRFRNLYRELNEDYLKWCWRRLNKRAAPGVDKVSYQQYETNLDENIRELVEKLKAKRYRARLIRRCYIPKDNGKQRPLGIPAIEDKLLQYAVSQLLQAIWESDFLPSSYGYRPGKGAREAVDDLQNELYGSWYRYVVDADIKGFFDNIDHDWLIRMLQERIDDRAFITLIRKWLKAGVLDTDGKVLHPATGTPQGGSVSPVLANIYMHYVLNLWFNKVIVKQSRGKAHLCVYADDFAAAFEHRDDAERFYRSLGERLKKFGLSLSEEKTRIVKFNRFEKETSSSFDFLGFEFRWTTSKAGKNWLKRSTSKKKHLKSLRTIKEWIKHNRDLPLKNFFRILNSKLRGYYNYYGIEGNLDILRAFHFNVIALLFRWLNRRSQRKSYGWSGFCEMLTHFRIIEPRIRPVANAS

SEQ ID NO: 2133 - protein, 496 aa, synthetic construct
  source 1..496: note = MG166-26 reverse transcriptase
MNGTRKSDRPMVPTKRPNEVLVTEEDVEGRGLTKGNAIEQNADRTLYRNTPALSALDRVRQRARKDKKAKFTALLHHVTVELLREAYRRLQRHASAGVDGVTWVQYGERLEENLRELHARLHRGAYRAKPSRRVYIAKADGRQRPLGIATLEDKVVQRAVVEVMNTIYEQDFVGFSYGFRPGRGQHDALDALAAAIRTKNVNWVLDTDIRDFFTAMDHGWVVKFVEHRIGDRRLVRLVQKWLSAGVMENGRWAASRVGSPQGATISPLLANIYLHYALDLWAHQWRQQARGDVVIVRYADDLVVGFEHEDEAKRFWADLRERLRKFALELHPDKTRLIEFGRYAKARRTRRGERGSPETFRFLGFLHACGSSRRGSFLLTRRSDLKRMRVTLQAVKETMTRRRHDPVDEQGKWLGQVVRGYLGYFAVPTNSRSIGRFRSEVIRMWCRNLRQRSHRHRLTWQRMTRIADRWLPPARIQHPWPEDRFHAKTQGRSPVR

SEQ ID NO: 2134 - protein, 420 aa, synthetic construct
  source 1..420: note = MG166-27 reverse transcriptase
MALTSLHHVIDLEWMTEAWRLTRKDGAPGIDGMTRADYEANLQANLLDLLERIKSGRYRAPPVRRTYIPKADGTQRPLGIPTLEDKVAQRVIVMVLETIYEQDFLPCSYGFRPGRSAHQALQDLRDACMDGRLRWVLDVDIRKYFDTIAHEHLRAFLDRRVTDGVIRRMIDKWLKAGAMEEGLLHHTTKGSPQGGVVSPLLANIFLHHVLDEWYADEVRPRLRGRSTLVRFADDFVMAFEEVRDAERVLAVLGKRFERYGLMLYPDKTRFVDFRPRQPGGDNHPGTGGTTFDFLGFTHVWGRSRRGYDVVRQVTAKNRLARGLAAVSDWCRRHRHRAISQQHRHLTAMARGHYAYYGMSGNIRRVRCYGQELVRIWKTWLSRRDNEGSFRWSQMKALLQRLPLPRPSIIHRYAFLSETPA

SEQ ID NO: 2135 - protein, 423 aa, synthetic construct
  source 1..423: note = MG166-28 reverse transcriptase
MITGLERIAQNKLKYPESKHLNLIHYVNVENLKGAYKRINGKKATGTDKVSKDEYGKDLEANLNQLVARMKTFSYRPQPTKRVYIPKAGSNKLRPLVIPSFEDKLVQNIMADVLSEIYEPIFYDFSYGFRKDRDCHKAIEHLSEMIQRNKVNYIVDADIKGFFDNVDHKILMEFLRKEIGDDVFLRYIIRFLKAGIMEHGKKIENDKNIPQGGLISPVLGNVYIYYALDMWFEIVVKKYCQGFCGIVRYADDFVCCFEYKAEAQEFFVKLQERLAKFKLEIEVNKSKIIRFGRYAGEGKGTFDFLGFTFISGTDRKGRYRTIKLTSKKKMSAKMKAANEWIHANMHMPVNELIKKLNTKLIGHYRYYGITGNYDKLEMFRWYVIERLKAWLHRRSQRAKMTWEKFDKIIEYNPIVKPKVYHSI

SEQ ID NO: 2136 - protein, 431 aa, synthetic construct
  source 1..431: note = MG166-29 reverse transcriptase
METKLVRIAEISAKSKHPIFTSVYHLINEDMLKQCHKELDGNKAVGIDKVTKDEYGKNLDRNIKELVQRLKNKSFKPLPSLRVYISKGNGKKRPLGIASYEDKIVQMAVKKILGAIYEPRFLNCMYGFRPNRGCHEAIKEVYQRISYGKISYIVDADIKGFFDHIDHDWMMKFLEWNIQDRNLLWLIRKYLKAGIMEQGKFEPTEEGSAQGSVMSPMLANIYMHHVLTLWFKLVVQREMQGECFLVNFADDFVAGFQYKSEAERYYKELKERMEKFGLELESSKSRLIEFGRFAEQNRRARGECKPETFDFLGFTFYCSKTRKGGFVPKGQTSRKKFEQKVRAYKNWIYDNRNRPMREIIKELNVKLIGHYRYYGVTWNFRKITTFLHRVQQFLFKAMNRRGCRRAYTWNGFVEMLKYYPLAKPKTYYCLY

SEQ ID NO: 2137 - protein, 511 aa, synthetic construct
  source 1..511: note = MG166-30 reverse transcriptase
MPAANLASGVPGKAFGRNPAITADEKSDACVVPTSEPNDGGGSIPAPAEAREGRRAAKRNAVQPPAPRTQSRTSASMRLDGIREVAKGNKGTRFTALMHHITPDLLTDSFRHLKRAAAAGIDGVTWQDYENGLAERIVALWDAVQSGRYRALPSRRVYIPKPNGKQRPLGIAALEDKIVQQAVVTVLNAIYEADFLGFSYGFRPGRSQHRALDALWIGLHSSKVNWVLDADIQAFFDTIDHTWMLKFLEHRIADDRILRLIRKWLTAGVIEDGERTVFQVGTPQGAVISPLLANIYLHYVFDLWTHQWRRHEADGDVIVVRYADDSVVGFEQRQDIVTFLADLRTRMAKFGLKLNEEKTRVLEFGRYAVERRARRGQRRPETFDFLGFTHICATTRETRRFTVLRLTSAKRMRASLHAIRQSLMQRRHGPVSTTGAWLNRVVQGYLNYHAVPGNLKRLGMFRAEVCRAWLFALRRRSQRTRMTWDRFARLVARYIPKVRVSHPHPNQRFAS

SEQ ID NO: 2138 - protein, 498 aa, synthetic construct
  source 1..498: note = MG166-31 reverse transcriptase
MSQKSNMHVGRESDSRVVPTKCPNKSGEPPAEGMEGRRLTKENAERTAAPQTQSWINASNGLLGVREVARKEKRIRFTALLHHVTVPLLLDSFYALKRNAAPGVDGVTWKEYETNLGRRLEDLHSRIHRGTYRAQPSKRAYIPKADGRQRPLGIAALEDKVIQQGVVTVLNQIYEEDFKGFSYGFRPRRGPHHALDALWVGLMRKEVNWVLDADVRDFFGTVVHEHLVKFVEHRIADRRILRLIQKWLRAGVSEEGHWSETEVGTPQGAVISPLLANIYLHYVFDLWAQHWRKHRTTGDMIVVRYADDIVLGFQHRADAERFLQEWRDRMRQFGLELHPDKTRLIEFGRFAANKRKQRGEGKPETFNFLGFTHMCGKTRKTGRFIVKRKTIPKRLSAKLKELKEELRRRWHEPVDQLGRWLRSVVRGYFNYYAVPGNMDSLNSFRSQAIWQWHRALRRRSQKSRMTWKRFEPLVTCWIPSAKILHPHPNLRFDARHLR

SEQ ID NO: 2139 - protein, 439 aa, synthetic construct
  source 1..439: note = MG166-32 reverse transcriptase
MTDASTSLDMLTGLRKVAERAKREPAARFNSLAHLIDEELLTKAFRRLRRDAAVGVDGITKEQYGQDLERNLKGLHERLRTRRYRHQPIRRVHIPKEQGRKTRPIGISATEDKVVQSALREVLEAVYEQDFLDCSHGFRPRRNAHGAVRALTRAVNLSKANWILEFDIASFFDSVDRTQLMKMLQKRVADGSMLRLIGKCLHVGILDGEELSEPSEGTVQGSTLSPLLANVYLHHVLDLWFTEEVMPRLHGRAMFVRYADDGVFGFEREEDARRVLAVLGKRLERFGLTLHPEKTRLLDFSRPPRSRTEGRSPTTFDFLGFTWYWRRNKKGGWSVRCKTRRARLARAIRAIQVWCKEHRHVSVREQHAALTRRVQGHFNYFGVNGNTRSLRNFMHQVRRRWFKWLRRRSQRASLTWARFLDLLKAYPLPTPRIIVSIWT

SEQ ID NO: 2140 - protein, 493 aa, synthetic construct
  source 1..493: note = MG166-33 reverse transcriptase
MHDQEKSDSGIVAAKPTNKAGRPAAELVEPRPGTKGNADQQSTHRTQSRARVTQALNRVRQAARQRKKEQFTSLLHHINADTLRTAFYALKRKAAPGVDGVTWQDYEADLEPRLKDLHRRVHRGAYRPQPSRRTYIPKADGKLRPLAIAALEDKIVQSATVMVLNAIYEGDFCGFSYGFRPGRGPHDALDALSTAIKIRKVGWILDADIQNFFGAVSQEWLIRFVEHRIGDKRIIRLIQKWLKAGILEDGVVTVDDRGTGQGSVISPLLANIYLHYCFDLWADRWRRREARGDMIVVRYADDLAVGFEYEDDARRFLDAMRERLGEFALSLHPDKTRLIKFGRFAAADRKRRGLGKPETFAFLGFTFICGKCRRGFFQLQRKTRRDRMQAKLKDIKAGLRRRMHLPIPIQGLWLKQVVTGHFAYYAVPTNGRALSAFRHYVTDLWRRTLRRRSQKDGFTWNRIANLADAWLPRPRILHPWPDARFAVKHCGYR

SEQ ID NO: 2141 - protein, 448 aa, synthetic construct
  source 1..448: note = MG166-34 reverse transcriptase
MDETPSSPTISTKLERIAKLAKDAPGMAFQTLAHHIDIDWLHEAYRRTRKDGALGVDGQSAQEYATKLEGNLRSLLDRAKSGTYRAPPVRRVHIPKGSGSETRPLGIPTFEDKVLQRSVAMVLEPVYEQDFLECSYGFRPGRSAHQALNDLWDEAMKMGGGWVLEIDIRKYFDTLDHGHLREVLRRRVHDGVLLRLIGKWLNAGVLEDGGITYPSSGTPQGGVISPLLANIFLHEVLDIWFDREVRPRLSGRARLFRYADDAVLLFANEADARRVFDVLPKRLAKYGLSLHPEKTRLVQFRRPQRRSSKSDHDDRGPGSFDLLGFTHYWGLSRSGLWAVKRKTAKDRFRRALARVAQWCREHRHDDIRAKQQALAQKLRGHYGYFGIAGNSDGITRFCREVKGVWRTWLNRRSNRGPMTWTRMCRLLKRLTLPTPRVQPRILSRVANM

SEQ ID NO: 2142 - protein, 418 aa, synthetic construct
  source 1..418: note = MG166-35 reverse transcriptase
MVVIPEIQNQMAKYHKVQGLMRYINIKSMKEAHAQMDGEKASGVDDISKFKYEESLEANLNNLLNKMKKFEYYPKPVRRARIPKANGKVRELGIPSYEDKIVQKIIADILNNIYEPIFLDCSYGFRPKRNCHQALYKMCETIYSGKVNYIVEADIKGFFDNVNQEVLLRLLKMIIKDRHFIEYVKRFLKAGVMEQGIPKPSETGTPQGGNMSPVLANIYLHYVLDQWFENNFKKEAEGECYLIRYADDFIMLFEKPTDGETANIRIRQRLEIFGLELQEEKTRIFSFGLKEETKATFDFLGFNIYNYKDGRNIKLGMKIKEENIPKKYEAIKECVEQYRYLEMETLIKLVNLRLRGYYNYYGVSTNIEWLISIYQYAVKEVFMVWIERYGVPRDYNYLKYVYRMTPVLQPYKFITLYL

SEQ ID NO: 2143 - protein, 435 aa, synthetic construct
  source 1..435: note = MG166-36 reverse transcriptase
MKEVLTVEMQIATRARKYPGEALTNLHEFIDVGLLNGCFDSLNKKGASGVDAEKWIDYNKQRNERIPQLLTAFRSGTYRAPNIRRVFIPKGDGKLRPLGLPTVEDKLLQTAVSRVLTPVYEDIFYHHSYGFRPGKSQHQALEKLSGEVSLNRMRYIIDADMQNYFGSINHQYLREFLDGKIKDGVIRKMIDKWLKAGILENGQVIYPTEGTPQGGSISPLLSNIFLHYVLDEWFKEKIQRLLKGDSFIIRFADDFLLGFTSKEDALRVMEVLPKRLGKFGLTLHPEKTRLIDLGEVEGEDKHPKKTFDFLGFTHYMSKSRKGKSILKRKTSSKKLNLALKRLSDWIKFYRQKLPIAVLIGELNQKLRGHYAYYGITFNCRKLHTYYNRTKHLLHKWLNHRGGKRVWTWNKIAKLTTEWIPLVRPKIYHSYQLAKP

SEQ ID NO: 2144 - protein, 529 aa, synthetic construct
  source 1..529: note = MG166-37 reverse transcriptase
MLPEGLPRDPRELPIPSHTKRNASYLGGYVNPRVDRRGRGWMTEQSYNLIVPMKVGNRRAPARGGHGTRWREGGSKRTNLWKGDITRLRTRIIMYTTIDRIAELAKEDPKRQFFSIAHLITVEKLYEAFRSLRRDASAGIDGVTYAEYETNAEENIRQLHQRLKEGKYRAQPLRRVYIPKEDGKQRPISIPALEDKLVQKAVADLLNAIYEQDFLECSYGFRPGRGQRQALNEVGRVVCRRPTGWVLEIDIRSYFDSIVRSALVEMIEKRVNDGSVLRLIQKWIKVGVIEDGKLLVSETGTGQGQPISPLLANIYLHYILDEWFEEVVKPRLKGEAHEIRFADDAILCFQHKEDAEKVLSVLPKRFGKYGLTLHPEKTRLIEFGRDAARKAKEQGKKPETFNFLGFTHICARSRKGRFAVYVKTITKRLSRGLKAVADWCKQHRHDPVDEQQKTLNAKLRGHYQYYGRPTNYRSIWQFYRRVRCIWREWLGRRTRGHGMTWERFEKILRQHPLVPPRIMYSWAGTGSSA

SEQ ID NO: 2145 - protein, 440 aa, synthetic construct
  source 1..440: note = MG166-38 reverse transcriptase
METELEQIAAKARSDAKCRFTSLAHHVTRERVWKNLKQIPNNSVPGSDGQSVSATKETFDAWIEPVLQSMHRRGYKAPPSRRVYIPKHGKQEKRPLGVSCISDRALQKSTSQVLSAIYEQDFLPCSFGGRPGRGAHNAVATLHEIIAGRKVSWVLEADLKNFFGSLDHEWIQRFVEHRVGDPRIISLIRRWLKAGVMEEGAMHPSEEGTPQGGPISVLLSNLYLHYVLDLWFERAIKPLLKGEAYLVRYIDDFVVCFQYRSAAIRFQHVLLKRLEKFALALEPEKTKLVEFGRYAQKYAAKRGRKLPETLKFLEFTFYCTRNLKGNFKVGISTENTRVRRSMLRLCDLMRQMRHLPVQEQVINLNSVLRGHYAYFGMAGNFHALQRIHRSVERYWKRMLSSRSQKGGITLQAFHCLKLRFPLLRLKLFIPYWKLQGLAVL

SEQ ID NO: 2146 - protein, 433 aa, synthetic construct
  source 1..433: note = MG166-39 reverse transcriptase
MGTKLERIADISAHMPRPEFTSLYHLIDAEMLKQCHKELDGSKAVGIDEVTKEEYGRNLDANVKDLVERLKRKAYKPQPAMRVYIPKDNGKMRPLAIACYEDKIVQLALKKILEAIYEPRFLDNMYGFRPGRGCHDAIKVVYRKLNNDRICYVVDADIKGFFDHMNHEWLVKFLELYIKDPNIIWLVKKFLKAGVMDEGELLATDAGSAQGSIVSPILANIYMHNVLMLWYKVIIAKRCKGDNFLANYADDFIAGFQYKWEAEEYYQLLKARMNKFGLELEESKSHMVMMGRYIANARVKSGENTKFGTFDFLGFSFYCGQSKTGKPWIMPKTSGKIFRKKVKAMKEWLYRHRDTPLKLIMKTVNMKLAGHYRYYGVSFNSRWMANFWFQTRELLFKILNRRSNRRSYTRAEFVDMLKYYPLATPKIYVSLFQ

SEQ ID NO: 2147 - protein, 427 aa, synthetic construct
  source 1..427: note = MG166-40 reverse transcriptase
MEKEAAGIRFQTRDEEPRMENLMHHVNEQTLMEEHRKQSRRKATGIDGVTKDEYNVNVEKNLKELVERMKRFSYRPMPVRRTYIPKANGKQRPLGIPAYEDKLVQGVMARLLDEVYEVRFLDCSYGFQKGKNCHDIVRYINQTAMTKKVNYVLEADIKGFFDNVNHEWLMRFLNLDIADRRFLRYVRRFLIAGVMEDGAYLESDRGTPQGGLISPVLANVYLHYVLDTWFEYEIKPRLHGEAYYVRYADDFLIMFQYEKDARAVMSVLPKRLGRFSLEVAEDKTRILPFGRFKGTKEDFDFLGFTFFNTTTRTGKYRVGVRTSKKKLKAKKQAAKAWLRQQLTKPIARTMETLAAVVRGHCNYYGVSGNFKQIQKFWKYLKYETYRMLNRRDQKGKLRYPKFLRIWNFYVEEPKLKVDIWGWKPKTV

SEQ ID NO: 2148 - protein, 497 aa, synthetic construct
  source 1..497: note = MG166-41 reverse transcriptase
MDDREQSDGLVVPEKLPNNAQGGAAEAVEGSGSAKGNTASKSRPGPSAGQGASSALGRVRQVAVKDKEARFTALLHHVDVDRLRAAYFALRPKAAPGVDGVTWEDYGEELEDNLRDLHARVHKGAYRARPSRRVFIPKPDGRQRPLGVAALEDKILQRALVEVLNAIYETDFLGFSYGFRPGRSPHRALDALAAGIVGQKVNWVLDADFRDYFSSLDHQWLVKFLEHRIADRRVLRLIQKWLAAGVIENGAWTAFEEGVPQGASASPLLANIYLHYVFDLWAHQWRTRHAHGDVVITRFADDFVVGFEYREDAERFWADLRDRLAEFGLELNAEKTRLIEFGRFAARNRKARGLDKPETFQFLGFTHACAKTRKSGRFKLKRITDSKRVRAKLLAVKDEMARRMHLPIPQQGRWLARVLQGHYNYYAVPDNIEALSAFRKGIIRHWLKSLRRRSQRSTMTWERMWRLADQWLPQPRIMHPWPEQRFAATTQGRSPVR

SEQ ID NO: 2149 - protein, 428 aa, synthetic construct
  source 1..428: note = MG166-42 reverse transcriptase
MIMKTKFAIISRLSADNPEMVFNQLMHHFNKENLLSWYQSLKGKAAVGIDGVTKEKYGENLDENLDVLLEKLKTMSYVPGSVKQILIPKEGKKGATRPLGIGNFEDKIVQKGVQKILEAIYEPLFWDCSYGFRPKLGCHDAIKALRGHLYSHSVRKIIDLDLSNYFGTIDHELLMEQLSNKIQDKRFLRYIWRMFKAGTLSDGELILSDEGVPQGSVCSPILANIYAHHALDDWVNRTVKNHCKGNVEIFRYADDAVICCENANDAERIREVLPKRLSKFKLRLNDDKTKTIVFNKFEKGNSKSFDFLGFTFYLGLTKSGRVVPKLKSCGKKLRSKLTKVNEWCKGNRSIYPLRELWKSFCRKLRGHVQYYGISFNFKALQGFMFKSVKIFFKWINRRSQRKSMTFDKFALFLLRFPPPEAKIYHRLF

SEQ ID NO: 2150 - protein, 529 aa, synthetic construct
  source 1..529: note = MG166-43 reverse transcriptase
MYASRLHGNREIPETTGRVPRPVRSVQAGGRNTDMNATGKSDTGVVSLKRTNKGAQPIQYGQPPAESVERRPVAKGNSVQTTMTDTLRSEPVLSALDRVREAAKRDSTLRFTSLLHHVTVDLLRNAYFALKRNAAPGIDAVTWSEYGVGLEERLRDLHDRIQSGKYQAKPSKRAWIPKPDGRQRPLGIAALEDKIVQQALVLILQPIYEEDFLGFSYGSRPGRNQHQALDAIYVAITQKKVNWVLDADIRGFFDSVDHGWVIKFIGHRINDPRILRLLRKFLRAGISEDGEWAKTVVGTPQGAVISPLLANIYLHYVLDLWVQWWRKHHARGEVYIVRYVDDFVMGFQYRSDARRFQAALKDRLLKFGLELHDGKTRLIEFGRFAIEDRAERHVGKPETFDFLGFTHICAKKRDGKSFALRRKTIAKKLRAKVAQVSEILMRHRHKPLPQQGSWLKSVVQGHFNYYGVPGNRRALDSFRTLVNGAWIRALRRRSQKARSLTWVRLQALVKRWIPSARIVHPYPDQRFCV

SEQ ID NO: 2151 - protein, 506 aa, synthetic construct
  source 1..506: note = MG166-44 reverse transcriptase
MVIPLAGICPGGRPQGRSLPGLPAKAPNKTGQPVAEALEERSPAKGNTDSETRPGLSAGRGVSSGLDRVRQVARKDKEARFTALLHHVDVARLGAAYRAIRPQAAAGVDGVTWQDYGQDLERNLQDLHRRVHSGAYRASPSRRVYIPKAAGRQRPLGIAALEDKIVQRAVVEVLNAVYEEDFLGFSYGFRPGRKPHDALDALAAGILRKKVNWVLDADICDFFSRLDHVWIEKFLRHRIADERVLRIIRKWLNAGVIEDGNWSETPEGSPQGASASPLLANVYLHYVFDRWARQWRRQNAHGDVIIVRFADDLVVGFEHREDAQRFLADLRERFAKFGLELHAEKTRLIEFGRFAAGRRRARGLGKPETCDYLGFTHICGKTREGRFKLKRITISKRLRAKLAEVKGQLKRRRHQPIPEQGRWLARVVRGHLAYYAVPGNSRALRAFRDQATRHWFKALRRRSQRHRLDWEKMKRLAARWLPPVSILHPYPGVRFDARTRGRSPVR

SEQ ID NO: 2152 - protein, 518 aa, synthetic construct
  source 1..518: note = MG166-45 reverse transcriptase
MHENRETSGVSSKYGDRSGKAQRRTPDVYAPEESDRVVVPMKPLNNEAQASAEGVEGRTRTKENTGQSHTPPAQDGHGVSQGLAGVRKVARERKQERFTTLLHHLTVDLLRQSYYALKRNAAPGVDGVRWPEYEEGLEGRLIDLKDRIHRGAYRAQPSRRVYIPKGDGRERPLGIAALEDKIVQQAVVTILNEIYEVDFRGFSYGFRPGRGPHPALDALNVGIQRKRVNWILDADIRGFFDNMDHEWTMQFVQHRVADKRILRLIQKWLKAGVSEDGEWSETKVGTPQGAVVSPLLANVYLHYVFDLWLEVWREKVADGEVIAVRYADDLVVGFEHRAEAERFLRAFRERLAKFGLELHAEKTRLIEFGRFARSNRQARGEGEPESFTFLGFTHYCGINSAGKFTIRRQTARKRLEAKLQQVKQTLRARMHEPVPKVGEWLRRVLNGFYQYHAVPGNWASLKRFRLQIGRYWRHVLRRRSQRGRITLKRMARLYDRWLIQPRLVHPYPDVRFDAMHPR

SEQ ID NO: 2153 - protein, 443 aa, synthetic construct
  source 1..443: note = MG166-46 reverse transcriptase
MHRNEESVNTKLHCIAEKASKDKRCQFTSLFHLMNKALLLECFSQLKGSAASGIDKVTKEKYEINLDINLENLVKRLHEMSYKPQPVLRVFIPKPGSHKQRPLGIPTLEDKLVQAGLVKILQAIYEQDFIDDSYGFRPSRGCHDALRALSQTVEGESIHYIVEADIKGFFDNVDQEQLIAFISHRIADKRMLRYIKRFLKVGISEDGKYRASEKGTPQGGVISPLLANIYLHYTLDLWFEKRIKRASRGYARLIRYADDYTACFQYVSDAKYFMEEMKSRLNQFHLEVAPEKTKLFEFGVFAQSKAKSRGERAETFEFLGFTHYCSRTRDGKRFRMKRKTISRRFTAKLVGYKEWLRANRTLPTAQIMKTTAAKLRGHYAYYGVTDNSKSLHGFAHEVTQTLFKWLNRRGKRRCYTWEKFNKLLSLYPLPKPRIMVNLLSSLR

SEQ ID NO: 2154 - protein, 447 aa, synthetic construct
  source 1..447: note = MG166-47 reverse transcriptase
MPNTEPEYSGTLTKLALISERAQREPKCQFTSLAHLLNAQFLGHCYYQLGRDRASGMDGVTWQEYGEKLEENLKDLVTRLKAKRYKPQPAKRVYIPKDEHSTRPLGLPALEDKIVQKGIAWILEAIYEADFLDCSYGFRPGRSCHQAVDAVDKTIMRNPINHVIDADIKGFFDNVSHRWMLEFLEVRIADPSFLLLVRRFLKAGYVDSGFLVATEQGTPQGGNLSPILANIYLHYVLDLWFEKRIKRQARGACFLVRYADDFVCMIRYQDDARHIERALRERFTQFDLELHPEKTRVISFGRYERENAQCQDRRAHTFDFLGFTHFCGRSRKGTFIVGRRTSRKKFRKKCKELNLWLKRTRNSRPVKEWWPILAAKLRGHYQYYGVSGNMPSLQRYYHLALRLALKWLNRRSQRSSFNWAGFGAYLEHYPLPPPRIVHNLYTLSPVT

SEQ ID NO: 2155 - protein, 510 aa, synthetic construct
  source 1..510: note = MG166-48 reverse transcriptase
MKSTELGHVRVKSLDTACARVEWPNRERSGRPETAACRRGVLSGIVVGDGESPSQGEGPDGSTQPAKETRAGHVGSDPHEPTSLRAIAKRARACKHHRFRDLYREVNADLLCHCWHALNKDAASGVDGLTAAAYGEHLRANLADLAERVKAKRYRAKLVRRVYIPKENGQQRPLGIPALEDKLVQLACTKLLTAIYEGDFLDCSYGYRPGRSAREAVCDLTFYLQYGSYGYLVEADIRGFFDHMDHDWLLDMLSLRIDDRAFVQLIRRWLKAGILETDGQVLHPGTGTPQGGIISPVLANLYLHHVLDLWFERVVRPRCRGEAKLCRYADDFVCAFRYREDADRFFEALPKRLGKFGLEAAPEKTRIVRFSRFHPSMKRRVTFLGFELYWFRDRKGEPRVMRRTARKKLQGACRRIKEWIKCNRHLPGRELIRGLNRRLVGHYNYYGLRGNSRSLWRFYQWAMDCAFKWLNRRGGKRKSFTWPVFTRAFAKLGIAKPRITERSSARRVFA

SEQ ID NO: 2156 - protein, 520 aa, synthetic construct
  source 1..520: note = MG166-49 reverse transcriptase
MHENREISSAPSAISEGRSAKAISRTADMHVLEKSDCAVVPVNQPNKPAQAAAEVGEGRAQMKENIDQPRMLPTQSGTRMSQGLGGVRKAARERKQERFTSLLHHLTTSLLRDSFYALQRQASPGIDGVTWQEYESGIEDRLVDLHSRVQRGTYRAQPSRRVYIPKADGRQRPLGVAALEDKIVQHAVVTILNQIYEVDFKGFSYGFRPGRSPHQALDALAVGLERKKVNWVLDADILGFFDNLSHEWAVRFIEHRVADRRIIRLIQKWLKAGVSEDGQWSETKQGTPQGAVVSPLIANVYLHYVFDLWADVWRRKAAQGDVINVRYADDLVMGFQQRADAERFLEDFKERLAKFGLQLHPEKTRLIEFGRYAARDRKQRGVGKPETFNFLGFTHYCGQRHKTGTFAVKRMTAKKRMVAKLKAIKAELQRRMHHRSSEVGAWLRKVVNGYYQYHAVPGNLDQMRTFRQRVARLWRNVLVRRSQRARKKWELLTPIFDRWIPRPRILHPYPQTRFYAIHPS

SEQ ID NO: 2157 - protein, 455 aa, synthetic construct
  source 1..455: note = MG167-6 reverse transcriptase
MDPQDPTTDKRPKQTQDDTLEVRHGVILSPTLTLLRRKLSQKAKQEPRFRFYALYDRIYRRDTLETAWCLVLDNRGAAGIDGVTVEEIFATEENVTAFLDEIQEALRTKRYRPDPVRRVYIPKANGKLRPLGIPTIRDRVVQMATLLILEPIFEADFLDCSYGFRPGRSAHQALEAIQRNLGEGYREVYDADLQGYFDSIPHDKLMACVRMRVVDGTVLQLLRMWLETPVVEQAEDGSSKVSRPRQGTPQGGVISPLLANLYLHWFDKRFHAAGSPAQRGQARLVRYADDFVVMARHQSPQLIGQVEGLLEEWLGLKINRDKTRVVKLNDGGASLDFLGYTFAYQRGRFGGRQRYLHWGPSAKSVDRERAQLRDMISRRVCWKPLAELIADVNRQIRGWANYFGLGHPRRAFRKINSYVRCRLFAHLQRRSQRPYRLPEGVTWYRHFAHHGLVAL

SEQ ID NO: 2158 - protein, 443 aa, synthetic construct
  source 1..443: note = MG167-7 reverse transcriptase
MNLLTSRISVEKLQNSLQAKAKSEPGYRFYSLWDKICREDVLQEAYRRSRANAGAPGVDGVGFDAIETLGVEQWLGTLQEELRSKAYAPQPLLRVWIPKRNGGQRPLSIPTVKDRVVQTAVVLVLGAIFEVDLKPQQFGFRPNMDAKMAVRRAYFHITQHNRRDIVDADLSDYFTTIPHGPLMRCVTRRVADGTVLAVLKRWLVVPVCERTARSGFIRTTESRDRNRGTPQGGSASPLLANLYFRRFLLAWYDHGHYHRLDAHVVNYADDLVICCRPGNGAAALAQMRRLMDKLGLTVNDQKTRLACVPEESFDFLGYTIGRFYGKDGKAFIGTEPSRKSLKRIIGRIHDETTPRWNFDPVEKRVDELNALLRGWSGYFNQGRVIHVYRIIQRYTDARLRRWLMRRQGKRGTGYRQYPNQHLYEALGLYKLPESRAAVTKAKA

SEQ ID NO: 2159 - protein, 442 aa, synthetic construct
  source 1..442: note = MG167-8 reverse transcriptase
MNAAKANNAKEKARQLQRTLYLAAKEKPNRRFHALYDKISREDIMTYAWIRVKANKGSSGVDKITIQSIVEDYGEKRFIAETCGQLRNGTYRPSPVRRVDIPKGDGKTRPLGIPTVRDRLVQMATKIVLEGIFEADFKDFSYGFRPKRSAHDALRKIMTTVNEGKVYWVVDVDIRGYFDNISHEKLMALVEQRVNDRKTLKLIRGWLTAGVMKEGEFYVSDLGSPQGGVISPLLANIYLNYLDTIWERKYTQLGSMVRYADDLVILCHRKADALEAIQVLKAVFARLELSMNTEKSKLVNVWGNDQGFDFLGHHLRRSTVMRKGGKEARVLRCYPSKKAMQKMRTKVKETTASRTLLKQKTSEIIAALNPKITGWRNYYAKVDKGVANGFLAKIDWYIRKRLMIFCRKKFKRWRLRQSGFFNVIKEAGLQSATTWPSTYCAR

SEQ ID NO: 2160 - protein, 446 aa, synthetic construct
  source 1..446: note = MG167-9 reverse transcriptase
MITGESLTGSASVRKLQTVLHAKAKEEPGRRFHALVDKVWREDFLLAAWALVRRNGGAAGVDGVTVADVKAHGVERWIGELSRDLKDGTYKPSPVRQVLIPKKQPGKFRPLGIPCLRDRVAQTSAMLVLMPIFEADLEPEQYGYRPGRSAKDAVRRVHRLLHRGRNEVVDADLSNYFGEIPHAELMKSIARRVSDGRMLGLLKAWLEMPVVEEDGKGGTRRTNRARKERKGTPQGAPISPLLSNIYMRRFILSWKQQGYAQHFGAEIVNYADDFCVLGKAPAAVMLVAVNWLMERLKLPVNAQKTRCLRCPEEPIEFLGYRIGWNHRPTDGSRYIGTRPSKASVRSICRGISEQTERRYECRSAEEVVERLNRMLSGWANYFNLGQVSPAYRAIDTHATRRLRQWFRRKHKVRSRGYVRFSDGWLRETCGLTYLGTMRRDLPRAKA

SEQ ID NO: 2161 - protein, 468 aa, synthetic construct
  source 1..468: note = MG167-10 reverse transcriptase
MLDLWWSGQNMGEPRGATYSAVERSGKGRGDGPQGLPTPDKVRKLQVTLYRKAQTDRSYRFWSLYGEVLRADVLETAWKRVASNRGAPGVDGQTIDSIRMNPQKEQAWLGEIREELTTRTYRPQAVRRVMIPKANGGQRALGIPTVKDRVVQMAVYLVLMPIFEADFHPRSYGFRPKRHAHQAMEAIREALRMGKVEVVDADLASYFDTIPHDRLLKQVARRVSDGAILKLIKGWLRAPVIDESGANPKPPRRHKRGTPQGGVISPLLANIYLHPLDVAVNEKCRQKPRMVRYADDLLILCRPGEGEQMRQRLKRWLEARGLILNEDKTRVVNSQYHSVEFLGFVMRWQKSRKGSWYVHTEPSVKSRQQLRDRLRKMTPRITTWRKTEMVVGEVNAVIRGWGNYFAYGHYGEVFVKQRRFASHRLRQWLWRKHGNPSGKYRRWTDSVLAEQYGLYQLPTAILGTRANA

SEQ ID NO: 2162 - protein, 433 aa, synthetic construct
  source 1..433: note = MG167-11 reverse transcriptase
MAKNETNSVRQLQRNLYRKAKQDKEVKFYSLYDKMYREDVLWEAWRQVKANRGAAGVDGTTIEMIVSAEQEAAMIQTLQEQLRQKSYQFQPVRRVDIPKPQGGTRPLGIATVADRVVQTAMKLVLEPIFEADFQDCSYGYRPKRDAKMASQAIRNDLYNRAWGVVEIDFKSYFTTIPHEKLMVLVKERVVDGSMLRMIKQSLKVGVSYGGEVVPTTVGVPQGSPISPLYSNIYLNLLDRVWQTRGYPEQLGATLHRYADDVVLVCRKSATQALEAFESITTRMGLTINREKTRITKITEGFDFIGFQFVKRPSPNTGKPHIYIFPSKTSQRNIRRRIKTFTKRRAPIMPDEFVRQVNEVVLGWANYYRHTNASEAFRRLQRFINIRFRRYLNYRSKRRGFGWKEFPNAKLYAMGMIYIGSGFIRYERTTVNAL

SEQ ID NO: 2163 - protein, 429 aa, synthetic construct
  source 1..429: note = MG167-12 reverse transcriptase
MQTNNSKEKVRQLQNKLYLTAKKCASRRFHALYDKVYRDDVLFEAWKRVKANKGSSGVDGIGIEDIEAIGIEKYLTDIKAELADGRYKPSPVKRVMIPKPDGSKRPLGIPTVKDRIVQMAAKIAIEPVFEADFRDCSYGFRPKRSAKQALEKVRKACNNKGYYVVDADIEKFFDNVNQDKLMVLIEQRISDRRIQKLIRQWLKSGVLYGNILTISELGTSQGSVISPLLANIYLNTLDRLWEKYGLTHGILVRYADDIVIICKNKKSANHALNLLRYIMAKLELKLHPIKTKIVSMWDGKEGFDFLGMHHRRMTTETSKGQLYKETYQYPSRKAMKKMKAEIKRNVNSRRLLVAKEEDLIKNLNPKITGWRNYYFTKTNEKWMQALDWYIICTFTRWYNKKHQRRNHMSKVGFVRNSIYGKGLKKMARA

SEQ ID NO: 2164 - protein, 448 aa, synthetic construct
  source 1..448: note = MG167-13 reverse transcriptase
MERNRRLGNLQTPGSVQKLRTTLHAKAKEEPGYRFYLLYDKLYRQDVLDYAYRSCKANKGAAGVDGVRFADIEAYGEDLWVGELAERLRKKDYRPEAVKRVWIPKPNGKLRPLGIPTITDRVVQTALMIVLEPIFEADLQPEQYAYRADRGAQDAVQAVHRLLNTGYQHVIDADLSGYYDSIPHAELMKSVARRIVDRHVLHLIKQWLGAPVEEDDGHGHRKRTTINQDTGRGTPQGSPISPLLSNLYMRRFILGWKQLGYEGRWSAYIVNYADDFVICCKGQANKAMGAMRNIMDVLKLTVNEDKTHLCHVPYERFDFLGYTFGRCYNHETGRAYIGTRPSRKSIKRMVDSITKETDRCRTLLDADYVVARLNRKLSGWANYFCLGPVSSAYKAINAHVTQRLRRWLRKKHKVQGKGFTRYPDQYLHTQLGLINLPRRTRDLPWAKA

SEQ ID NO: 2165 - protein, 433 aa, synthetic construct
  source 1..433: note = MG167-14 reverse transcriptase
MIKAPIGLQDLRRRIYAKAKAEPSWRFWGLYVHVCKTETLQAAYKLAKENNGSPGIDGVTFESVESAGRAEFLEQLHEELTSGTYLPQRVRRVGIPKSGGKLRMLRIPTIRDRVVQGALKLILEPIFEADFQPGSFGYRPKRSAHDAVQRVRQGILRGKTRVIDLDLRSYFDNVRHHLLLEKIAVRVDDDAIMGLLKKILKSSGNRGVPQGGVISPLLSNIYLNEVDRMLQRAKEVTRHGEWSRVEYVRFADDLVVMVDSHPRYAWLFDALQKRLREEFDKLKVEVNEGKSRIVDLARGECFGFLGFNFWRVRSRKERWMPLVMPKLKKRTELLRKLKSIFKRSVSQPLRGVIDQINPILRGWVNYFAVGNSSRCLSFIRTWVEKNIRRLLAKARQRHGFGWKRWSSRWLYGELGLYNEYKVRRLPPMKASPS

SEQ ID NO: 2166 - protein, 462 aa, synthetic construct
  source 1..462: note = MG167-15 reverse transcriptase
MRPNTPTDKVRELQRRLYVAAKRSSTRRFHALYDRIHRSDVLREAWRRVRSNGGAAGVDGESIRAIEEGGVDAFLEGIQADLQAGRYRPLPVRRRYIPKADGKQRPLGIPTVRDRVVQMATKLVIEPVFEADFLPSSYGFRPKRSATQALEAIREAGNRGHNFVLDADIRAYFDSIDQEKLMGMVSERISDRRVLKLLRKWLEAGVMEEGTVRNPVAGTPQGGVISPLLANVYLHYLDRVWAQRCKHLGVLVRYADDFVVMCGTEAKVNEARRRVELVMARLGLTLHPEKTRIVDLRRGKEGFTFLGCVNRKRRSIQRAPHLHFMHRWPSPKAMERVRERVHGLTDARRSGAKDVKEIIASVNPVIRGWGNYFRTGTADREFNRIDWYVHERITRWLQRRGGQRARYWRSEWPFERLFAMGLHRLRKSVRYSAQAVPRRPSVSRVRATRTHGLKGGAGNRLA

SEQ ID NO: 2167 - protein, 409 aa, synthetic construct
  source 1..409: note = MG167-16 reverse transcriptase
MYGHEISPGYGAQHALKEKWNTGGPSAQSVSRQGGSYKPKAKSSAAQRKSEGIVVPRMGAKKNTSGGKGPCGGRDGGEGKREGMTGQTSRSNSPERQKPIANGGEARTGAGVRSRLRRVFARVPARPRGHGALEVLRKTAHNHVFDADIRDFFGTMDHQVLMKRIERRVSDRRVLRLVRQRLRAKVMDDGRAGGVIWPLLSNIDLNYLDSVWRRQCAHLGVLVRYADDFVVMCRTAKECEEAERRVKIIERLKLELHQDKTRRVDLSWGKEGFDFLGCHLRKRLSGPIWEKQRKRVYFLQRGPSQRSMKRVRQRVKELTPRARCHDDVREVIADLNPVLRGWGNYFRTGNASNQFIDIDRYVWRRLKDLRLKRAGRQLRAGVAERWNEDYFVGLGLHRLRGTVRYPEVT

SEQ ID NO: 2168 - protein, 434 aa, synthetic construct
  source 1..434: note = MG167-17 reverse transcriptase
MEGRGGLTMVSISLQDLRRRLYVKAKAEKTKRFWGLYVHVAKLETLRAAYEIAKKHNGAPGIDGVTFAAIEAGGVEGLLVQLRDELVARTYRPLRNRRVEIPKRGGKVRVLGIPAIRDRVVQGALKLIMEPIFEADFYDGSYGYRPQRTAHEAVARVAQAIVSGKTRVIDVDLAAYFDTVRQDLLLGKVAQRIQDGEILQLLRLMLKASGKRGVPQGGVISPLLANIYLSEVDAMLERAKEVTRDGEWARVEYARYADDLVILVDGYRRHAWLLQAVDRRLREELATLDLRLNEAKSRIVDLGQGEAFGFLGFDFRRVRSLRGRWRPQYTPKLTQRTALLEKLTERFRRYDSQPVGRVITEINPILRGWVNYFRIGNAARCLAYVRNWVEKKVRRHLMRARNRAGFGWKRWSTVGLYEALGLFHDYRVQYGART

SEQ ID NO: 2169 - protein, 443 aa, synthetic construct
  source 1..443: note = MG167-18 reverse transcriptase
MGNLATPESVQRLRTALHAKAKEEPEFRFYALYDKIFRTDVLAHAYACCRANKGAPGIDGRTFEGVEAYGAERWLGELARQLREETYRPEAVRRVYIPKPNGKLRPLGIPRLAERVCQTAAMLILEPIFEADMPQEQHAYRQNRNAQSAVREVHGLLVSGHKDVVDADLSGYFDTIPHVELMKSVVRRVVDRRVLHLVKMWLDTPVEEQDGRGRKKRTTVNRDTKQGIPQGSPISPLLSNLYMRRFILGWKKAGLEQRLGARIVNYADDLVICCKGDSAAKALNAMRQMMGRLKLTVNEEKTRICRVPDGEFDFLGYTFGRRYSAKTGRPYIATRPSRKSIKRMTEAVRIQTGRNMEWLDAGDMVKCLNQKLGGWANYFNLGPVTPAYRFLDRYTTNRLRRWFSKKHKQPGKGFTHYPDEYLYQELGLIRLPMLPQNLPWAKA

SEQ ID NO: 2170 - protein, 440 aa, synthetic construct
  source 1..440: note = MG167-19 reverse transcriptase
MSLETPLKIRSLQRKLYCKAKAEPAFRFYLLYDKICRDDILGHAYALARANAGAPGVDGQTFAEIAANGVEDWLAGLRQELVTKTYRPAPVRRVMIPKPGGGERPLGIPTIRDRVVQTAAKLVLEPIFEADMEASAYGYRPGRGGTDPVKEVHRLLLRGYTDVVDADLSKYFDTIPHSELLKSVARRVVDRHVLRLIKLWLKAPIEETDGEGKRRLRGGKSSTRGTPQGGVASPMLANLYMNRFLKHWRKTERGEAFRAHVVAYADDFVILSRGHAAEAMAWTKAVMTKLGLTLNEAKTSLKDARVESFDFLGYAFGPEYHRKGHYRYLSASPSRRSVQRLKDKVNGLLVPGNQDPWPEVRDRLNRLLRGWSGYFSYGTRLMAYRAIDNHVYDRVRHFLRRRSKVPGRGTRRFSDAEVFGTYGVLRLRRVHLGALPCAVR

SEQ ID NO: 2171 - protein, 430 aa, synthetic construct
  source 1..430: note = MG167-20 reverse transcriptase
MNAKWLTTPKEKVQQLQEKLGHAAKENKKRKFHALYDKIYAWDTLKEAWNRVQANKGAAGVDGETFANIEKIGVEEFLHDCQKQLEQGKYHPEPVRWQYIPKKDGKQRPLGIPTIRDRVMQMATKLMIEPIFEADFQESSFGFRPKCSAKQALDRIRKACNRKGNWVIDVDIQGYFDNINQEKLMKLVELRINDRRVLKLIRKWLQAGVMEEGKVRRSDLGTPQGGVISPLLANIYLNYFDVLWERHGTAVGELTRYADDFVVVCKTKKDAEHAFKLIRTIMERLELTLHPTKTRIVGLWTGEEGFDFLGMHHRKTKAETSKGKVYYTTQQWLTKKAEERIREVVKERLAPPSMRSYSFAEHMAWLNPKIQGWRNYYYTPYSQLKLAKLDWYILQRLTRWCAKKRQRRRWMSSIHEVKFIAKQCGLKTLL

SEQ ID NO: 2172 - protein, 440 aa, synthetic construct
  source 1..440: note = MG167-21 reverse transcriptase
MLKTPDNIRELQRKLYRKAKQEKEYRFYLLYDKIYRLDILNHAYRLVKANKGAPGIDGEAFDSIEEKEGGVEKYLEEIAGTLKRKDYKPQAVRRVNIPKPAGGKRPLGIPVIKDRVVQMAVKIVIEPIFEADFQENSYGFRPKRSAHQAVEDVRNHLLKGKTDVIDADISKYFDTIPHDKLMQLVAKRIVDKQILKLIKMWLKAPIVEEREDGKKEYKGNDKGTPQGGVISPLLANIYLNVLDTLWAVKKVQERLGARLVRYADDSVVLCRGNTDRILTGIKRVLDDLGLTLNEEKTRIVDARQESFDFLGFSIGMKRGLRTGKIYPHTEPSKKALKHIRSEIKQLTTERYSATPTAVVIRRVNEVARGWVGYFRYGNCTKTMSALKGYLVYRMRIYLRRKHHYRSFGYKAYPDRYYYDSLGLYEVPTKAPWSQNVKASG

SEQ ID NO: 2173 - protein, 427 aa, synthetic construct
  source 1..427: note = MG167-22 reverse transcriptase
MDNNLPTTDKVQEFQRKLYLKAKSQPNFRFYALYDKIYRTDVLQKAWQRVRLNHGSPGIDGKTIKDIEEAGVEDFLKGIQQELKAKEYQPSPARRVYIPKPDGRLRPLSIPTLKDRVVQMALKLVIEPIFEAHFEDNSYGYRPQRNAQQVALEIRKYLNYGMTEVIEADLEDCFGSIPHRELLDMIARRVVDGRVLHLIKLFLKTGVMEQGGKRIDETGTPRGGVISPLLANIYLDQMDKGWKPLNETARLLRYADDLVIITKYNAEKFLFELQKLTTKLKLKLKPAKTRVVNAEEESFDFLGYSFRKALNPQKTKKVAYFWPSQKAEKTIKEKVRKITNPARPVKVGQVIKELNPVIRGWVNYFRIGNSTKKFDNLKLCVAEKIRKFMRRRRQKAGYGYKKYPDEYLYSKLGLYRDYHLAWTKALR

SEQ ID NO: 2174 - protein, 466 aa, synthetic construct
  source 1..466: note = MG167-23 reverse transcriptase
MSAVLASPADSGAVVVDKVRLDKVRALQHTLYRTGKADPGRRFHALWDKVLRRDVLWRGWVAVHANNGAPGVDRTTLDWIEKRSTASTGSWMNCPANCGRGPIGPLPARRVYIPKPGTTEQRPLSIPAVRDRVVQAALKIVLEPTFEADFAPCSFGFRPKRGQHDALQVLVDESWRGRRRVVETDVADCFSAIPHDRLIQAVEERVCDQSVLKLLRAMLRAGVMESGVVHHPDTGTPQGGVISPLMCNVYLHRIDRAWDTRTYGVLVRFADDLLLVCKSEQQAQAALVRLRELLADLGLAPKEAKTRIVELALGREGFDFLGFHHRMVQSRGIHGRGGIEFLDRWPSDRAMRRAHDRITELTVRSRLWLLVEEVVKDLNRFLRGWAGYFRYGHSAARFHTIAQHARDRLALFIGKRHKRGRGFGRSVVAYKSKDSCGLLNLNGTVIAPRANKPWREKPNAGGERRR

SEQ ID NO: 2175 - protein, 452 aa, synthetic construct
  source 1..452: note = MG167-24 reverse transcriptase
MNQNNVGVEVQGELFKRRGHEIPDAERVQTLQDKLYHKAKHERNYKFYVLYDKMFIPYMLRQAWKSVKSNGGSPGVDRQTIADVEKYGVETYLQELGEEVRKQTYQPQAVKRVMIPKANGGERPLGIPTVRDRIVQTVCKMIIEPIFEADFEESSYGFRPNRSSKDAITAIKGNLKRGKTAVYDADLSKYFDTIPHDKLLIALKERISDPRMLKLINKWLKAPVSDHGQYKGGKKNHVGTPQGGVISPLLANIYLHLLDRIVNNPNSLFGKYGIEIIRYADDFVLMGKAIPPEVTEKLQGILTRMGLSLNETKTRQINARESSFDFLGFTIRHDVDLFGRTFKYWNIVPSRKSEQKVRDKIRDFMSIHGHSTTEDLTHGLNSILRGWLNYFEIPGVSFPINSKYRLRFYLSVKLYRYYARKSQRKCKLFGQKVFDVLTTKYKLIDPIKYALS

SEQ ID NO: 2176 - protein, 444 aa, synthetic construct
  source 1..444: note = MG167-25 reverse transcriptase
MHAIKGQPHPFDSSRQLQRKLYLAAKKSRNRRFHALYDRIYRPDILWRAWVEVEANGGGAGIDGKTLQVIETEGVANFLEVLHRELKEGKYRPLPVKRVYIPKADGSQRPLGIPTVRDRVVQQACRIVIEPVFEASFHDCSYGFRPKRSAVQAVQKVKDDLVFGWQVVDADIRGFFDNLNHELLMSLVARRISDRRVLKLIRSWLKSGIMVAGEWEAVDGGTPQGGVISPLLANIYLHVLDMYWMRDFSHLGKLVRYCDDFVIVCYHRWQAEEAMKAVQGIMKRLQLELHPEKSRLVNLNETGFDFLGFHFHKVQSRVSGKYAPLTWPSRKAMKAIRTKIHDLTSVRWLRIPLQEILNNLAPVIRGWCGYFRRGNATNQLQALDRYVRRRLYKNFWRRSKRRSNKVKDAFCRWWESVKVEPFYLKGYCGGTLRKPSGESGRKAV

SEQ ID NO: 2177 - protein, 444 aa, synthetic construct
  source 1..444: note = MG167-26 reverse transcriptase
MIAKAQNMPLDKVRVLQRSLYRAAKANPTRKFGVLYDKVCRADVLRAAYRQVKANGGAPGIDQQTFEIIEKEIGVDVFLRDIKERLLRKRYKPLPVRRVYIPKADGTQRPLGIPVIADRVVQAAVKIVIEPLFEANFKDFSYGFRPQKDAHKALREVYKWLNFGCHWVVDADLKSYFDTIPHDRLLLSVRSKVIDRSVVKLIEMWLKAGVMEEMQVRKETTGTPQGGVISPLLANLYLHWLDNYWVRKGYGERKHDAHIVRYCDDFVILCSRRPDVYLAETKKVLDRLGLTLNAEKTRVVNVKEETFDFLGHRFTVRPSKRTGETKTYYYPRPKAMKAVKSKIREVVRNGQHWDLPELIRERINPILRGWGNYFKIGNSRKHFLSIANYTTYILSIMLRKKHKKRSKGWRDHPPSWFYTNHGLFKLYSLKNGVVAPVRTRVVTP

SEQ ID NO: 2178 - protein, 437 aa, synthetic construct
  source 1..437: note = MG167-27 reverse transcriptase
MVLSATGGDVRELQRKLWASAKRSPERRFHALFDRIYRSDVLWEAWRRVRKNRGAAGVDSQTLAMVEEYGVERLLGELQCALREGSYRPAPVRRVAIGKPDGGVRPLGIPTVCDRVVQQATRMVLEPIFEADFLEVSYGFRPKRSALDALERIRVAFPRGAVWVAEADIRDYFSSIDQQKLLALVAERVSDRRVLKLLRLWLQAGVMDDGVLRETVTGTPQGGVISPLLSNIFLHAFDRAFVARGIGTLVRYADDWVVLCSSEREARAALAAAGEILDGLGLELHPEKTRVVDLREGREGLDFLGCHFRARVSGRLLERGIRRYYLHRWPSQRAMKSIRGKIKAKTGRNRTGVKDIRVVIDDLNPILRGWGNYFRTGNAADKFTEIDRYAEWRLKRLMVKRKGRNLKAGQAERWTHTWFHGLGLHQLMGTIRYPGTA

SEQ ID NO: 2179 - protein, 434 aa, synthetic construct
  source 1..434: note = MG167-28 reverse transcriptase
MTKAPISLQDLRRSLYVKAKADPTWRFWGLYVHVCKRETLYEAYRMAKENGGAPGIDGVTFEAIEESGVEDFLRQIRDELITNTYRPMRARKKEIPKDGGKVRVLSIPAIRDRVVQGALKLILEPIFEADFQPGSYGYRPKRTAHQAVNRVAQAIVEEKTRIIDIDLRAYFDNVQHYLLLEKVARRVQDDAVMHLLKMMLKATGEKGVPQGGVISPLLSNLYLTEVDRMLEKAIATTRRGQYTHVQYARFADDLVILIDSHPRHDWLVRAVERRLREEMGKLRVEINEEKSRRVDLSKGEKFSFLGFEFRRILSRNQKWRAHFAPKLKKRTALFAKLREIFRRYSSQPVGRVIELINPTLRGWVNYFAVGHSSRCFSMVKDWVEKKVRRHLMRARKRRGFGWKRWSSEWLYGTLGLFSEYRVLRSAPPAKALPG

SEQ ID NO: 2180 - protein, 435 aa, synthetic construct
  source 1..435: note = MG167-29 reverse transcriptase
MTKTPVNLQDLRRRIYRKAKAEPTHRFWGLFVHVTKAETLEQAYCNAKQNGGAPGVDGQSFKDIEAQGRTAFLAALRDDLVANRYEPKPNRRKDIPKGNGKVRTLQIPCIRDRVVQGAVKLILEPIFEADFCTNSYGFRPRRSPHRALAEVRRSVLRLMSTVIDVDLSRYFDTIRHSVLLDKIAKRVQDPEVLHLVKQILKVGGKVGVPQGGPFSPLAANIYLNELDWTFDAIRRKTAEEPYEEVNYHRFADDIVITINGHHSKRGWAERAQQRLQEQLVPLGVELNKEKTKVVDLLKGEAFGFLGFDLRRTRKRKGNGHYLQMTPKKKARKAIKAKIRDIIRHGGATPLPKMIEQINASLAGWVAYFRVGNSSRAFSEVRDYTEMKVRNLLTRRKRRKKTSIGWRRWTNEYLHGVLGLYWDWKVQPLPGAKRLT

SEQ ID NO: 2181 - protein, 427 aa, synthetic construct
  source 1..427: note = MG167-30 reverse transcriptase
MIKAPISLQDLRRKIYLKAKADKAWRFWGLYVHVCKRETLQEAYKMAKRNNGALGIDGVTFDAIEAAGLEAFLEGIHRELVSGTYRPMRNRRKSIPKDKNKVRILGIPTIRDRVVQGALKLILEPIFEADFQAGSYGYRPKRTAQAAVNLVAEAVVRNKTQVIDVDLKAYFDHVRHDLLLKKVAERVNDARVMSLLHLILKAGGKRGVPQGGVISPLLSNIYLNEVDKMLERAKEVTRRGKYEYLDYARYADDLVILVDGLQRWDWLVKAAYGRLLEELGKLDVQVNPEKSRIVDLTQGETFSFLGFDFMRSKTRRGKWGVRVTPKMKARTSLLRKLKEVFRRHTSQAVDRVIYLINPILRGWVNYFRIGSSSRCFGYIKVWVEKKIRRHLMRARQRSGFGWDRWSRAWLYKTLGLFKDYRVQWYRA

SEQ ID NO: 2182 - protein, 457 aa, synthetic construct
  source 1..457: note = MG167-31 reverse transcriptase
MGASRLTAKSYTEEEIREIAERQNLVGYPHLALMREKLSVKAKNEPKFRFYNLKRLVVETETLRCAWAQVRANRGAPGVDGVTIEDIERSEGGAEAFIEGIQKELHEKTYRASPVRRKYIEKANGKLRPLGIPTVKDRVVQCAVKLIIEPIFEADFHDCSFGFRPNRSAQQAVDRIAAEIKSGKRQVYDADLSSYFDTIPHDKLFLALRTRITDSGVLSLIRQWLKSNSVEPNGVQKSPKGKGTPQGGVISPLLSNIYLHWFETCAMLVAKATNQVMSIVRYADDFVILAGKWADGFVQRIEGELENRFELVVNREKTKLLDMEADKSALSFLGYEFRYVRDRHYCKGDRYLEWCPSNKSVKKVCRKVKEETMRRKLLLPVEGVIKRLNLVLDGWGRYFKCGYPSRQFAKVNTYARYRLYKFLNRKSQRRYRLKYAETYYGELQKLGLIALTRRRYR

SEQ ID NO: 2183 - protein, 444 aa, synthetic construct
  source 1..444: note = MG167-32 reverse transcriptase
MRTYIATPESVQKLQAALHDKAKKSPNFRFYALYDKVYRKDVLAFAYACSKANGGAAGVDGQTFEDIEAYGVERWLDELTQELKSQTYRPLPVRRVYIPKPDGKTQRPLGVPAIRDRVPMMAAVLVLDPIFEADLQPEQYAYRRDRSALDAVRHVHKLINTGHVEIVDADLASYFDSLPHAELLKSVARRVVDGAMLHLIKRWLTAPVEETDERGKKHRTTRNRDEGRGSPQGSPISPLLSNLYMRRFVLGWKKLGHERRLGAFIVNYADDLVICCRGRGEEALAAMQVMMTKLKLTVNETKTRVAKLPEEKFDFLGYTFGRCYSPKTGRAYLGTIPSRKRVKRICEAISNETRRSTTPLDHKIVVTKLNQMMNGWANYFCLGPVSKAYRAVEKHARRRLRQWLRAKHKPSKTSTGKFSIAYLHDRCGLIRLTQRTSGFSWAKP

SEQ ID NO: 2184 - protein, 444 aa, synthetic construct
  source 1..444: note = MG167-33 reverse transcriptase
MLTTPEGIRTLQRKLYRKAKQESAYRFYALYGKVCRADILSHAYGLVCANKGSAGIDGVTFEAIETTEGITAFVAELAEALKSKTYRPDPVKRVMIPKADGTKRPLGIPTIRDRVAQMAVKLVIEPIFEADFCDTSYGFRPKRSAHGAVDDVAHTLNKGYCEVIDADLSKYFDTIPHADLMAVVAERISDGEILRLIKMWLKASIMEEDKDGKKRNIGGGKGNRKGTPQGGVISPLLANLYLHQLDRIWEKRQLQKRLGARIVRYADDIVILCRYGAERPMTILRQILEQMKLTLNEAKTKTVDAYKGKFGFLGFTIWMGKGRKTGNYYPHVQPSKKSLQTIKDRITKLTTRERTIMPLEWVVNEVNATVRGWVGYFHYRNCSQTLAHIRYHLEQRLITHLRKRYKVRDRNTGYVRFPQRALYDRYGLYKVPTTAAWAKAHAPR

SEQ ID NO: 2185 - protein, 441 aa, synthetic construct
  source 1..441: note = MG167-34 reverse transcriptase
MSLQAPEKVQKLQQTLHAKAKESPDFRFYALYDKLCREDILAHAYQVARHNGGKPGVDGEDFADIESYGVERWLGERAQALREKRYRASPVRRVYIPKPNGKQRPLGIPTIRDRVIQTAAVLVLAPIFEADLQPEQYAYREGRNAHDAVRHVHKLLNTGHTDVIDADLSGYFDTIPHAELMQSVARRISDRHMLALIKQWLVAPVEEDDRRGGRRRTTRAKDSKCGIPQGAPISPLLSNLYMRRFLLGWKTLGLEARFQARIVNFADDFVVCCRGTGEDAMEAMRKMMDKLKLTVNETKTGRCRIPQERFDFLGYTFGRCYSTQTGRAYLGTRPSKKSVQRVCRRISEMTSRRRLLIDPEDEVRALNRVLIGWANYFSLGPVSKAYRAVDRHATQRLRRWLCEKHKQPGKGTARYPNEHLHDVLGLQRLSVRTRDFPWAKA

SEQ ID NO: 2186 - protein, 431 aa, synthetic construct
  source 1..431: note = MG167-35 reverse transcriptase
MNAKANNTIDKVRELQRKLYLSAKANKKRRFHALYDKIYREDILTKAWKQVKSNKGAGGVDEVSIDDINSYGEDKFLKEIKEELLGNRYNPKPVKRVYIPKKDGSKRPLGIPTIKDRVIQMAAKIVMEPIFEADFKEYSYGFRVKRNAHDALEDIRKECNKGGWWVLDGDIRNYFGNINHDKLMILLKQRISDRRILKLIGKWLKCGVFENGEYTASKVGSPQGGCISPLLSNIYLNYFDTVWEKYYSHTGRLVKYADDFVIISKTKKDVQHAYKAVEEIFKRLKLQLHPEKTKIISLWGGKEGFDFLGFHHRFIIRKSKANFKYHDIMQIPTGKAMKGMRAKIREVFGSRATLQNDIRDMVKKMNRKLNGFKNYYAINYLARQQLKKIDWYVTLRFTIWYRNKKQLKQRCRYTGELTTELKNCRIVKLSY

SEQ ID NO: 2187 - protein, 603 aa, synthetic construct
  source 1..603: note = MG169-12 reverse transcriptase
MRNPRIILNTLHNHSKISDYKYERLYRILFNEEMYYVAYQRIYAKPGNMTAGTDNKTIDNMSLKRINALIESLKNETYQPKPARRTYIPKKNGKLRPLGIPTFEDKLVQEVARMILESIYEDYFESTTHGFRPFKSCHTALTQIRNTFTGAKWFIEGDIKGFFDNIDHNVLVDILKERIADERFIRLIRKFLKAGYVEQWHYHHTYSGTPQGGIISPILANIYLDKFDKYMNEYADKFNKGKEKRLNPQYLKVIRQMNNLRKKIKRCKEEIKIEQYETEYRKLKREALNMPCRMDMDETYRRVKYVRYADDFLIGIIGSKADCEMMKTDITRFMEKNLKLELSQEKTLITHAQKAAKFLGYEISIRKSIAYKRNKNNVLMKSFNGNVILTLPIGIVKEKLLDYNAMSIKSPKGKEIWQAKYRGFLNKRDIAEIVSQYNSEIRGFYNYYSIANNISKAGSKFGHIMEYSMYHTIAQKTNSSISEVIRKYTKDGDFTVPYTDSKGNVRFRVFYNEGFKRKEANKYADCDNMPKVFHVPRPSLVERLKTCTCELCGHKGEVVMHHVRTLKTLKGVKEWDKMMLQKHRKTLVVCKKCYATINNCKEI

SEQ ID NO: 2188 - protein, 611 aa, synthetic construct
  source 1..611: note = MG169-13 reverse transcriptase
MENVRDIMRNPKLVLNSLSEHSRNTDYKFERLYKNLLNAEMYYVAYQKIYAKPGNMTQGVDGQTIDDMSIMRIKQLVDSLKSETYRPSPSKRTYIPKKNGKKRPLGIPSFDDKLVQEVIRMILEAIYEGSFEQTSHGFRNNRSCHTALVSLQKSFIGTKWFIEGDIKGFFDNINHDVLINILRERIRDERFINLIRKFLNAGYVEDWKFHKTYSGTPQGGVVSPILANIYLDKFDKYVKEYIQKFNKGEKRGRTVEYRKLECRKRYLSKKLKNVESEELSNAIISEIKEIDRKRTLIPSNDKMDDGFKRLKYVRYADDFILGLIGSKKDSMQIKNDIKGYLNDVLKLELSEEKTLITHTEKPAKFLGYEIYIRKTNQTKGNSLGRKVRTFNSKVVLSITPEIIRKKLIEYDAIRFKTIDGKEIWRPKARPYLLNHDDLEILEQYNAEIRGFYNYYSIANNSNLVSNLGYIMEYSMYKTFASKYNTTISKIINKYRRAKEFSIAYTDKYGNTKYRDFYNQGFKRKQPYCMSPNDLIPNTHIISNCRTSLIDRLKACKCEICGAEENLHMHHIRKLKDLKGKKRWEILMIARKRKTIAVCINCHYKIHAGKLD

SEQ ID NO: 2189 - protein, 603 aa, synthetic construct
  source 1..603: note = MG169-14 reverse transcriptase
MRNPQIILDALCSHSKVSDYKFERLYRILFNEEMYHAAYERLKVKQGNMTPGTDGDTMDGMSLMKITRLIDSLKDETYSPKPARRTYIPKKNGKLRPLGIPSWNDKLVQEVVRMILQAIYEGAFSDRSHGFRPYRSCHTALTQIQKTFTGVKWFVEGDIKGFFDNIDHDILIGILRERISDERFLRLIRKFLNAGYVEDWKFHESYHGTPQGGIISPILANIYLDHFDRHMARYAETFNRGEGRKRNPEYFNLNTKTCALRRKLRKETDENKRAELRERISLMQAKLRTLPCKLDIDDDYRRIVYTRYADDFLIGVIGSKEDCERIKADITIYMRDCLHLELSPEKTLITHAQETAKFLGYDITVRTSERMSRTRNGILQRNHKGKVHLLLNSETVRKALEKYDAVQYTSENGKIVWKPKSRPKLLAMKPHKILERFNSEIRGFYNYYCIANNCSGQCSSFAYIMEYSLCKTLAQKLNTTKIKIKSKYTNNGRFSISYRTKDGSIKESVLYNQGFARKAKGYDVQPSVECPNEFLPATTLAHRLKSGVCELCGKDNEVLYMHHVRMMSCLDKNTPWGRQMLKRRRKTLAVCKTCMDIINQSKQ

SEQ ID NO: 2190 - protein, 600 aa, synthetic construct
  source 1..600: note = MG169-15 reverse transcriptase
MRNSENVLNILSEHSNVSGYKFERLYRILFNEQMFYAAYQRIYAKQGNMTSGMDGKTIDQMSVLRIDNLIVSLRDESYKPHPARRVYIPKKNGNKRPLGIPSFEDKLVQEVVRMILGAIYEGYFEYSSHGFRPNKSCHTALTHIQKTFSGTKWFIEGDIKGFFDNINHEVLINALRERIADERFIRLIRKFLNAGYVEDWKFHKTYSGTPQGGLISPILANIYLDKFDKYMKEYAKSFDKGRERQSSTEYKRLENKRSRLVIKAKSVEDESVRANLIDEIRKVESEIVNTPYGLNMDETFKRLKYVRYADDFLIGVIGSKAECVEIKANITRFMSEELNLELSDEKTLITHAQHAAKFLGYEVSIRKSQALRHNRNGVLRRPFNGRIVLRVANEVVKKKLLDYDAISVGQVNGKEVWKPKSRSYMIGMKPEDIMAQYNAEIRGFYNYYSIANNISYLGNSFGFNMEYSMFKTIAQKQNSTLAQTIKKLRKGKNFIVSYVDGKGQKRTRVFYNEGFKRKTAKGHTQYDNLPNTNISPYPSLIERLKTEVCELCGAEGKTVMHHVRTLKDLKGNNEWEQQMFKRHRKTLAVCETCNAKIHVR

SEQ ID NO: 2191 - protein, 603 aa, synthetic construct
  source 1..603: note = MG169-16 reverse transcriptase
MRNSTNVLNSLYKHCKDLDYKYERLYRILYNKDMYAVAYQRIAPKQGNMTAGTDGKTIDGMSIERIDRLIESLKDESYQPKPSRREYIPKKNGKMRPLGIPSIEDKLLQEVVRMILEAIYEGQFSDCSHGFRPQRSCHTAMEQISKSFCGAKWYIEGDIKGFFDNINHDVMIKILEKRIGDCRFIRLIRKFLNAGYIEDWQYFKSYDGTPQGGIISPILANIYLDQLDKYMEEYASKFDKGVRKEVSKLYRHYQRKKGRAKVALKKATTAEERNEALRLVKMYDSLMMVTPAKNEGDTNYKRLKYVRYADDFLCGVIGSREDAIKIKADIKEYLESKLRLELSEEKTLVTYSNNPAKFLGFEIRNRKCAETRRDTLGRKKRSRNKTVEIRIPKDTVKKKLLDYDVVEIKKHNGKEIWKPKARPELNFNDDLEILQRYNSEIRGFYNYFGIGVNCAKQMNNFGYIMEYSMYKTFAAKYRSKVTKICRKYKKDGIFTVSYQGKKGNTIEAKFYNGGFKRLKPSKDSRISTLPNFIMHTSTTSLMDRLKAQKCELCGATDRLEMHHVRKLKGLKGKEPWERMMIARRRKTIALCSSCHKKVHNGKA

SEQ ID NO: 2192 - protein, 603 aa, synthetic construct
  source 1..603: note = MG169-17 reverse transcriptase
MRNPEKVLNSLSVHSREQEYKYERIYRILFNPEMYYVAYQRIGSKPGNMTSGSDNETIDGMSLKRIEDMIGRLRDESYQPMPSQRVYIPKKNGKLRPLGIPAINDKLVQEVVRMILEAIYEPQFSNMSHGFRPSRSCHTALASIEKTFCGIKWFIEGDIKGFFDNISHEVMIGILNERIGDERFIRLIRKFLRAGYLEDWKFHHTYSGTPQGGIISPILANIYLDKLDKYVEEYIQSFDKGMGRKMSEMYKSLQYKRKWAMYKLKECREKGAKRKPLVNNLKTHIKAMASVSCGDEMDAGYKRLKYVRYADDFLMGVIGSKKDAETIKEDIKKYLTNRLSLEMSDEKTLITHSGDRAKFLGYEVCVQRSSSMRRSKDGSLRRAFNKRVRLMLPKDLIKKKLLSYNAVEIKTHNGKEFWKSKSRGGLTALDDLEILKRYNMEIRGLYNYYSLAHNCCEMAQFGYIMKYGMYKTYAHKYRTKSKAIHRKYDKDGVFTLTIQLKNGKSKDYTFYQGGYKRQSAIELAKIDYAPSLMVFKTTTSLIDRLKAGKCEICGATENLVMHHVRKLGELKGKSTWEKLMVARNRKTIAICSKCHKQIHLGNG

SEQ ID NO: 2193 - protein, 637 aa, synthetic construct
  source 1..637: note = MG169-18 reverse transcriptase
MRNSAKVLNGLSKHSPLSNYRYERLYRLLFNEEMFYTAYQRIYAKEGNMTAGSDGKTIDGMSLNRISKLIDLLRTETYQPQPARRVYIPKKDGKMRPLGIPSFDDKLVQEVTRMILEAIYEGQFLDCSHGFRPKRSCHTALVKVKRTFTGAKWFVEGDIKGFFDRIEHQILITILKERISDDRFLRLIWKFLKAGYVEDWTFHNTFSGTPQGGIVSPILANIYLDRLDRYMEKYAEEFNKGTKRKPHETRYGFENKKARLMQKLKNVKDENERREIVKQIKVIDKERITFPSCDEMDGGYKRLKYVRYADDFLIGIIGSKEDSKQVKNDIKNFLETELKLELSEEKTLITHTEKPAKFLGYEVSVRQSDLPRRDTLNRLTRTYNNKVCLRITMDIIKKKLLDFGIVEIRHNVNGKEWWKPREHTKMLNNDDLEILRMYNYTLRGFYNYYSVANNSAIMNAYGYIMEYSMYRTFACKYRTSVQKILRQYQRDGVFTVSYTTKKGGVRSQSFYKDGFKRKEPIADVNLDSQEVIYHSMRTSLIDRLKAEKCEICGAMGKLDMHHVRKIKDLDGKGYADKLMIMRQRKTIALCRSCHLKTHAGSIDRPFNGEPDTLRGVSPVRGRAFENLPSKYGKALGA

SEQ ID NO: 2194 - protein, 600 aa, synthetic construct
  source 1..600: note = MG169-19 reverse transcriptase
MRNSENVLNILSEHSTDSDYKYERLYRNLFNEQMFYTAYQSIYAKQGNMTSGTDGRTIDQMSIQRIDDLIVSLKNETYKPRPAKRVYIPKKNGKKRPLGIPSFEDKLVQEVTRMILEAIYEGYFEYTSHGFRPNKSCHTALTHIQKSFSGTKWFVEGDIKGFFDNINHEVLVKTLKERIADERFIRLIRKFLNAGYMEDWKFHKTYSGTPQGGLISPILANIYLDKFDKYMKEYAKSFDKGKERRGSTEYKRLENKRSRLVAKTKSGQNESVREQLMDEIRKVEKEMINTPYGLNMDETFKRLKYVRYADDFLVGVIGSKAECMQIKANIAQYMSEQLKLELSEEKTLITHAQNPAKFLGYEIYVRKSQALRRNRNGVLRRPFNGRIVLNVSNGTVRRKLLDYDAVYIKQVKGKEVWKTKARSYMIGMKPEDILAQYNAEIRGFYNYYSIANKISYLGNSFGFNMQYSMFKTIAQKQNMTMAQMIKKLRKGKDFIIPYIDKKGQKKVRVLYNEGFRRKTAKDYAQCDNIPNTNISPYPSLVERLKAERCELCGAEGKTVMHHVRTLKDLKGENEWEQQMLKKHRKTLAVCETCNAKIHVR

SEQ ID NO: 2195 - protein, 611 aa, synthetic construct
  source 1..611: note = MG169-20 reverse transcriptase
MQNAEQILQAMRKLGEKRIPLTRVYRCLFSEDLFLAAYDKIARNRGALTAGTDDDTVDGMNLERIRKIIGQLRKEQFRFHPSRRINIPKKSEGTRPLGLPNFSDKLVQEVIRQILETYYEPRFRDSSHGFRPGRGCHTALRRMSDKFKGATWFIEGDIRGCFDNIDHEILMAILARDILDGRLLNLLRMLLEAGYMEEWHYHRTYSGTPQGGILSPLLANIYLNELDAYIEDVLILQYTRGKKRAQNHEYYRLGKRIKVARSKGNIEDARELEQQRRQLPSGDVNDSCYRRFQYVRYADDFILGLIGTQSEAEEAKTAIGVFLKEKLHLEMSASKTLITHARTEHAHFLGYDISIYHGDDKLSSRTGSLTKFRSANGHVRLGIPYGKVAELTKRYQRGGKTIHEAGLLHHSDAEIVNVYQQRFRGLAEYYKYATDRSALGKLKYVMEIALTKTLANKFRVSVAQVYQKYGGSRQVDGRDYKVLVVTVPTSNGTRSIYWGGIPLKVVKPGSQPIDDNIGQRDLPLSSRTDLIQRLQANECEVCGSTDRCEVHHIRKLADLKSRWRGRKAKPAWVVSMIAMRRKTLVVCKTCHNAIHAGKPLPNNAHEFWRAG

SEQ ID NO: 2196 - protein, 600 aa, synthetic construct
  source 1..600: note = MG169-21 reverse transcriptase
MREAKRVLEIIRDRGYRGLPLERIYRLLYNPELYLMAYAKIAGNSGVLTPGVNKETVDGMNLGKIQGIIEALKYERYRFKPARRIYIEKENSKKLRPLGIPTWSDKLVQEVIRLILEAYYEPQFNPTAHGFRPNRGCHTALLEISNVWVGTVWFIEGDIKGCFDNLNHEVLINILSMKIKDNKFLRLISGLLKAGYMEQWKYNNTYSGTPQGAVLSPLFANIYLDKLDKFVETKLIPENTRGKQRARNQEYEIANARAYYAKKRGEVEKSKKWKQIARNLPSKDTKDPNYRRLRYVRYADDFILGFAGSKAEALEIKSKLQEFLREELRLEMSKEKTLVTHGRTGRANFLGHEISVAQNDTKIDQGGKRGVNGQIRLHVPVEKVNKFLLPYLLNGKPRRRPELLKESDYAIVGHFQTVYRGFAEYYKYAGDRSLRFKRVKRVMERSLVMTLANKHDSRVSKIYRKYGTKILTPKGQYKGLQVVVERVGKKPLVATWGGISLARVNPREEQRILVDKIHYHNNTGNELLKRLLADECELCGSQENVEVHHIRALKDLKKEGRKEPPDWVKRMSANNRKTLVVCHKCHQSIHHGKHDGIKTE

SEQ ID NO: 2197 - protein, 613 aa, synthetic construct
  source 1..613: note = MG169-22 reverse transcriptase
MDFARLSRKLEGLEKASRQGSKIVDLHRIMRHPDIWYEAYANIYSNKGAMSPGVDDVTVDGMSYERISNLINAVKEGNYNPKPVKRVYIPKKNGKLRSLGVPSGDDKLVQEVLRILLERIYEPIFIDVSHGFRPDRSCHTALMQIQKCWTGVHWLVEFDIKGFFDNMDHDILVSLLEKKINDKRFIKIIKRFLKAGYLEDWKYHATYSGIPQGGIVSPILSNIYLHELDKYMAELCRVFNKGKERPRNPEHQKISRRIRLLRKKLENLGNTPEVIQELKELQARQKCMPSGITHTEEFKRLKYCRYADDFICGIIGSRHDAEQVMQTVKDFLQHSLQLEIAPEKTRIRKAKNGIEFLSYGMRIQQGEKRVKMKVKGRYTTLRVTRGIIILSTPRHQVEQFCLKYGYGNWQDNKPLHRTELTSSSDVEIIETFNAELRGLSNYYALAKHVKAELSRLQYLSQYSLFKTLAYKHKTKVTKVIENLKVGREYIHRYKFKEGWKEIKVFQLKHMNISNKCRDEIPNTLHLTASTSELIKRMEANRCEYCGRVDSPVEVHHVHKLKDLKAKPNLKLWQKIMVARHRKTLILCAGAEDSCHRLLHQGKLPDNRYQPKNA

SEQ ID NO: 2198 - protein, 605 aa, synthetic construct
  source 1..605: note = MG169-23 reverse transcriptase
MQPTIEILEKTKKNSKKNKDEVFTRLYRYLLRPDLYYVAYKNLYSNNGAATKGVNDDTADGFSEEKVAAIIKSLSDESYQPSPSRRTYRQKANGKKRPLGIPTCTDKLVQEVLRMVLEAVYEPLFLDCSHGFRPKRGRHTALKYVKNQFTGTRWFIEGDIKGCFDNIDHHVLVNIISAKIKDARLQKLIYKFLKAGYMEDFQYNATYSGTPQGGIVSPLLANIYLHELDKFVEKQSAAFFKPRERLLTPEYSRISSEMARTKKKLQKAADTGNEDEKAFLLQRVSDLKAQLLKTPCKSQTDKQIKYVRYADDFILGINGDREDCQRIKNELSTFINDVLKMELSAEKTLITHSNQYARFLGYDIRVRRSNVIKPNGRGATQRTLSNQVELAIPLADKVMPFLFKNSIIRQENGKIEPIARTSLLRLTDLEIVSSYNAELRGICNYYHMAANFNTLHYFGYLMEYSCLKTLAAKHKTSIGKIKRKYNDKNGGWCIPYETKNGVKQLHLAKYSDSRNVKNPNDAISSVTMIHKNTRSTFEDRLKAKTCELCGTTTSERYEIHHINKLKNLKGKEPWEVMMLSKRRKTMVLCYDCHKKIHNQSFEVKQ

SEQ ID NO: 2199 - protein, 597 aa, synthetic construct
  source 1..597: note = MG169-24 reverse transcriptase
MQPTTEILEKISRNSLNHPDEVFTRLYRYMLRSDLYYLAYKSLYANNGASTKGINQDTADGFGPEVVERILTKLQDGSFQPKPARRIQISKANGKMRPISIPTFTDKLVQEVMRMILEAVYEPIFMNCSHGFRPKRSCHTALEQVKLSFTGARWFIEGDIKGCFDNIDHQTLIGLVSRKIKDARFIGLLWKLLKAGYLEDWRYHNTFSGTPQGGIISPILANIYLHELDRYVMKLQGQFAKPRDRAYDPRYAKIMHEIRAVNNQLDRAAAEEKPELVKEHKRLRLEIRRVPCKSQTDKRISYTRYADDFLIGVVGSREDCEQIKQELTAFVKAELKMELSEEKTLITHSNTYARFLGYDIRVRRNSIARRTANGRIKRVLNGKVERNIPVVDKIEKFLFSHDVVWKKDGKLEPCHRKSLLHLTDLEIVTAYNAELRGICNYYNLASNFNCLHYFSYLMEYSCLKTLGAKHKCNVAKILQMFKDGKGWSIPYMTQKGEKKVRIATYQDCENTCTCSDVIPMLTVQHLHSRNTFESRLMAHVCELCGSTDSQHYEVHHVHKVKDLKGKAVWEQIMIAKRRKTLVVCRECHKRIHGKKID

SEQ ID NO: 2200 - protein, 603 aa, synthetic construct
  source 1..603: note = MG169-25 reverse transcriptase
MRNSERVLNSLAKHSKQPDYKFERLYRLLFNEQMYYVAYQRIYAKEGNMTKGADNKTIDRMSISRIEKLISSLKDESYQSIPSRRVYIPKKNGKKRPLGIPAFNDKLLQEVVRMILEAIYEGSFDMNSHGFRPKRSCHTALRQIQRTFNGARWFIEGDIKGFFDNIDHGVMISILEKRISDERFLRLIRKFLNAGYLEDWTYHKTYSGTPQGGIISPMLANIYLDQLDRYVREYIQRFDKGKERADNPERIKFEYGKRLAVLKLEKVKDKEQRKSIVKEIKAYDKGRAAISCGVDMDENFRRLKYVRYADDFLCAVIGTKAEAETIKQDIKVFLQEKLALELSEEKTLITHGRKSAKFLGYEIYVRKSTQTKRNKAGKLTRPYNNKIYLKMPLETVRKKLLDYDALKINVHNGKEQYKSKHSTYLINNDDLEILERYNSEIRGFYNFYSLANNCHTLHSFKYIMEYSMYKTFAAKYKSTVVKICKKYKKDRVFTVYYKNNKGKTLMRQFYHDGFKRKKLDYAQCYDRMPTRYYSSPTSLVARLKACKCELCGKENVKLDMHHVRKLKNLQGKEDWEKHMIARKRKIIALCRSCHKKVDGGWMD

SEQ ID NO: 2201 - protein, 604 aa, synthetic construct
  source 1..604: note = MG169-26 reverse transcriptase
MRNPENVLITLTKHSNNKNYKYKRLYRLLYNEQLYLNAYQRIYSNNGSMTKGTDNKTVDGMSVERIKKIILTLKDESYQPQPARRTYIPKKNGKMRPLGIPSFDDKLLQEVIKMILEAIYEGHFEDTSHGFRPNKSCHTALDKIQKTFTGVKWFIEGDIKSFFDNINHDTLINIMKERIEDERFLRLIRKFLNAGYMEDWTFHNTFSGTPQGGIISPVLANIYLDKFDKYINEYISKFNRGKDRKRTTEYRKNEVALSKARNALKNASNEAERQAAISSIRQLEKERVNIPHSDPMDKSYARLFYVRYADDWLCGVIGSKDDCMKIKEDIKNFLYNELQLELSEEKTLITNAKKCAKFLSYEIRVRQSNLNKRDKIGRLVRNYTGRVVLEISSETIRKNLLETGALKLVYHNGKEIWKPKAIYRLKDCDDLEILDYYNSKIRGFYNYYCIANNSSIINSYKYILEYSMYKTYATKYRTTVHRIIEKYRLNKDFAVKFKNSKGIECTRLFYNQGFKRQKKAFYSNVDMIPNDIKYFSSTSLIDRLKAEKCEVCGKTNTPIEIHHIHRLKDLQGKKYWEALMIAKQRKTLALCRECHKKLHCGKLD

SEQ ID NO: 2202 - protein, 610 aa, synthetic construct
  source 1..610: note = MG169-27 reverse transcriptase
MRNPTEVLKNLMEKSKNETYRFQRLYRNLYNPEFYWLAYKNIYANDGSMTAGADGTTIDGMGNERIERIILSLKERSYQPKPARREYIAKKNSSKKRPLGIQSGDDKLVQEVVKMILESIYEPVFSNKSHGFRPNRSCQTALKQIQNTFTGANWFVEGDIHACFDSFDHHVVIDLLRKRIDDEAFIQLIWKFLKAGYMEQWTFNRTYSGVPQGSGVSPVLANIYLHELDKFMENYAENFNTEAKRKHFSTAYKSSVSKTYRYRKKGREIWNSLSEEEKKIRCKNLKKLEMIEKSTTPYVYNDSNYKRVQYTRYADDFIIGVIGSKADAEAIKKDVKIFLQKALKLEMSDTKTKVTHTGDRARFLGYDITVSRVQTLKKTSNGKVQRCQTGVVKLYVPREKWVGKLIEYKAIKIKINENGKERFVALHRGKLVNQSDIEILARYNAEVRGLYNYYSIANDSFKIGRFANVMKYSMYKTFACKYKTNVHEIKRRYCRNDLFTVAYETRQGTKTTTFYKDGYKRKECATKFDNVNELPQFSKYAKTNTLKQRVERHTCELCQKDCRNLVIHQVKKLKDLKGNAEWVLLMRKRRRKTLVVCPECHNLIHSQHRK

SEQ ID NO: 2203 - protein, 611 aa, synthetic construct
  source 1..611: note = MG169-28 reverse transcriptase
MRNPENVLKSLTTCAEQADYQFKRLYRNLYNPEFYQLAYQRIYAKPGNMTQGTDGLTIDGMGMERINKIILSMKDHSYQPKPARREYIKKQNNPKKKRPLGIPSVDDKLVQEVIRNILESIYEPAFSPNSHGFRPRKSCHTALQQIKSTYTGTKWFVEGDIKGCFDNIDHHVLVDILRRKIKDEYFIALIWKFLKAGYLENWQYHSTYSGTPQGSLISPVLANIYLNEFDNFMSKYEKEFYKGKKRKQTKAYIKAANDYQIAKRKLKKQWDNLTDAEKKQENRQIKDLKNIMLNTVYNEPMDNGYKRLKYVRYADDFIIGVIGGKEDAERVKHDIGEFLLNELKLTMSEEKTLITHGAAHARFLSYDIEICNNQSVSTDENGNKARRHSGKARLLMPREKWLNKLREYKAFTVTHDKTKGNAEIWKPAHRANMLNNDDLEIMLQYNAEIRGLYNYYCLAENVSSLHSFGYIMKYSMYRTYAMKYKTTIGGVMNRFYRNGRFGIPYQTKTGDKTMYAYDEGFKKLDTPLHDIDSVSMNNRFNLSSNSLITRLKAKRCEWCGEENCDIEIHHVRKLKDLKGKALWERKMIARKRKTMALCKQCHVNLHSGKLD

SEQ ID NO: 2204 - protein, 599 aa, synthetic construct
  source 1..599: note = MG169-29 reverse transcriptase
MQSAQTVLSMLKQKSKQDETYTFERLYRNLFNETFFLRAYQKLYPKEGNMTPGIDNTTIDGFSKQTILKLIELLKEEHYWPKPSRRTYIPKKNGKLRPLGIPCFEDKLVQEVIREILEAIYEPIFCECSHGFRPNRSCHTALNQIKRKSRGATWAIEGDITRCFENIDHDILINLLSKKIDDGRLLVLIQRFLEAGYFEFKVVHNSLSGTPQGNGLSPILANIYLHTFDLYLEELSKQYSKGTEKHRNPLYKQLISQRQKAIRQGDKAKAMQVLKQMQTIPSANPMDELFIRVHGCRYADDFLVCVTGSRALACEIKEKLGDFLKQTLKLELNQEKTSITNLAKTRVRFLGYELSKSQCNTKLTKDRHGHKRRSINGNIQLLVPGQVIRDKLEPFRIGCKPYPCKARSNLSIREIFDMYNAEIRGLYEYYCLATDVSKKLTRFKYFHYGSLLKTIAGKERSSVMAVVCKYGVVVPRRQGTGVKRIIGVQYETKAGSKTMTYFDEPLVWVKYPPVKLLDFFGPLLGGGHLLKRFRACVCELCGSSDGVVVHHVRKLKEVKQRYCRQGKMPPVWAATMLKIRRKTLVVCHSCHAEIHSVKL

SEQ ID NO: 2205 - protein, 592 aa, synthetic construct
  source 1..592: note = MG169-30 reverse transcriptase
MRTAQTVLTVIQERGKQHKPIERVYKLLFNRDLYLNAYAKLYPNNGAMTKGVTEETVDGMSIQKIDRMIELLREEKYQWKPARREYIPKKNGKKRPLGIPTWGDKLLQEVMREILEAYYEPQFSTHSHGFRPNRGCHTALQEIQVWKGTRWFIEGDISKYFDTIDHAVLLKILERNIHDGRFIRLVANMLKAGYLEDWKFNQTISGTPQGGVISPLLANIYLNEFDQWIEKVLIPNNTRGKRQKANPVYSRMSAEISKARKNSDIQTAHRLKVERRNIPAVDPYDENYRRCRYVRYADDFLIGFTGSKADAEEIKAAMHDFLEKELHLELSKEKTLITNASSQAAKFLGYEIKAQRVNDYLDPKGRRGANGAIALFVPARVIEDRCRSFKQNGKVTHRNALLHDDDFSIVQRFQQEYRGLVQYYILAQNLSWFSKLYWTMETSLLKTLACKHRSSIKKQKAKYKTTTTSTSGKTVPCLQVVVERPGKKPLVATWGGISLAHKRKAVIEDKPYKVYGGRTELIKRLTADICELCGSRKDIEVHHIRKLADLKTKGKSAPPVWVQIMAARQRKTLVVCRECHTAIHNGTLNTRS

SEQ ID NO: 2206 - protein, 596 aa, synthetic construct
  source 1..596: note = MG169-32 reverse transcriptase
MRPAETILAVIRDRGTRGLPLERVYRLLFNRELYLWAYAKVSRNTGARTRGSTPETVDGMSQAKIDALIDELRHERYRWTPSRRISIPKRNGKTRALGRPSWSDKLLQEVLRMILEAYFEPQFSDHAHGFRPQRGCHTALHSIQQTWKGTVWFIEGDIAQYFDTIDHEVLVKILGEYIHDGRFLRLIRGLLTAGYMQEWKFNKTLSGTPQGGVLSPLLSNIYLSRFDQWVTDTLIPAYTRGLRRKPNRDYHRINNQLYEMRKRGRSEGVRDLVKRRRLLPEGDLADASFRRLRYVRYADDFLLGFIGTRAEAEDIKRTVQEWLRVHLNLTLSTDKTLITHAKTQMARFLGYDITGRMANDQLDVMKRRVLNGHMELRVPNEVIEAKCARYYKRGKVLHRPELLAESDYSIVTRFQQEYRGVVQYYLLAHNVRYLSRLRWVMEQALLKTLAAKHHVSVRTIWQRTATTTRTTSGQPLRCFEVRVERQGKPALIARFGGISLKRQPHASLNDQPYVYKVSGTEILQRVLADACELCGAREDIQVHHIRKLADLRQPGRKEKPAWVKIMAARRRKTLVVCRSCHGAIHAGKPPRQRITE

SEQ ID NO: 2207 - protein, 603 aa, synthetic construct
  source 1..603: note = MG169-33 reverse transcriptase
MRSPERVLNSLSEHSKNSSYKFERLYRILFNEEMFYVAYQRIYAKEGNMTKGSDGQTIDNMSLKRIERLIGTLKDETYQPQPSRRVYIPKKNGKKRPLGVPTFNDKLIQEVVRMVLEAIYEGSFEYTSHGFRPNRSCHTALAHIQKEFSGAKWFVEGDIKGFFDNINHDILINILKERITDERFIRLVRKFLKAGYIEEWQFHNTYSGTPQGGIISPILANIYLDKLDKYIKEYTVKFDKGKKRKFSRESMDFSNAKKRIVRRLKSVKDEKQRAKLILELKAIEQGRAKYPNGEEMDTNYRRIKYARYADDFLVGIIGSKQDAQQIKEDIKNFLADRLTLELSDEKTLVTHTERPAKFLGYEITVRKSNDQRRDKMGRLRRTYGKRVCLNVNMETVRKKLFDWGVLEITNRNGKEIWKPKCKPGLIFNDDLEILDSYNREIVGFYNYYSIANNCAHALNNFKYIMEYSMYKTFAGKYKSRTRKINKKYRKNGRFIVKHMTKAGVKERYFYDGGFKRKKPTYKSECDIMPRTIYTAGRTSLVERLKACVCELCGATDDLVMHHVRKLKNLQGKESWERHMIARKRKTIAVCRSCHKKIHDGKID

SEQ ID NO: 2208 - protein, 596 aa, synthetic construct
  source 1..596: note = MG169-34 reverse transcriptase
MQPTTAILDRIMKNSRNNKEEIFTKLYRYMLRPDLYYLAYNKLYRNKGASTKGVDDDTADGFSEEKISKIIQSLADETYTPKPVRREYIPKKRNSAKKRPLGLPTFTDKLIQEVLRMILEAIYEPTFSDFSHGFRPNRDCHTALNSLKQEFTGVTWFIEGDIKGCFDNIDHHVLVDIINSKIKDARLIKLIWKFLKAGYMEDWKYNSTHSGCPQGGVISPLLSNIYLNELDKFAEKTAKDFYKPRDRVRTPEYAKVAHKKYYATKLLKTATGQKKSELLKKVKVLKSELRKVPCTSKTDKVIKYIRYADDFIIGVKGDRADCERIKQQFSEFISGKLKMELSEEKTLITHSNNYARFLGYDVRVRRDQTAKPSGDKLLRTLNYTVELNVPFADKIMPFLFDKAIIKQTHGGEIEHIARKYLYRCTDLEIVDTYNSELRGICNYYGIASNFISLNYFAYLMEYSCLKTLAGKHKSTSKKIRDKFPAKGGGWGIPYDTKKGQKYRVFAKFTDCKGGNSFNDVIVEYAIRHAGMTTTLEKRLSAKVCELCGKTNTPLAMHHVNKVKNLKGKEQWEIVMIAKKRKTLAVCKDCHHKIHHP

SEQ ID NO: 2209 - protein, 607 aa, synthetic construct
  source 1..607: note = MG169-35 reverse transcriptase
MIHLRNPNNVLNSLTEHSSNKDYKYQRLYRLLFNNELYFIAYQKIYAKEGNMTKGSDNRTIDNMSLQRIENLISSLRDESYQPKPARREYIPKKNGKMRPLGIPSFEDKLLQEVVRMLLESIYEGYFEPTSHGFRPKCSCHTALTCIETYYTGSNWFIEGDIKSFFDEIDHNIMIDILRGRISDERFLRLIRKFLKAGYIEDWQFYKTYSGTPQGGIISPILANIYLDKLDKYMKEYADNFNKGQKRQVTKEYIAINGKRARLVLKMKKATDESAKKEILSQIKALDKQRLEIPSVNYMDENFKRLKYERYADDFLIGVIGSKEDCKRIKSDIKEFLKKKLNLELSDEKTLITHTSKSARFLGYDISVRRSNGHAKYDKRHRLCRTMNGKVVLKIPMEIVKRRLLDYKAMVLKTHNHKEIWKPVSRDALVNNDDLEILRQYNAELTGFYNYYSIAINSGVLNNFKHIMQYSMFKTLANKYRTSKTAIIKRMRTGKDFGVRYSANGKEKIALFYSGGFGRKKLQYGVNFDVIPNTAKFGARTSLIDRLSARVCEYCGKTDVDLYMHHVRKLKSLKGKEDWEQFMIARKRKTLAVCDECHRKIHNGKMD

SEQ ID NO: 2210 - protein, 603 aa, synthetic construct
  source 1..603: note = MG169-36 reverse transcriptase
MTSTQDFLDIVHQCGQRGIPIRKVYRRMKDKDLFLAAYGKLYKNAGSLTPGITDNTVDGMSISRIDSLLEKLEQGTFQWTPVRRTYIPKKNGKLRPLGMPTWEDKLVQEVIRMILEAYYEPNFRDSSHGFRPNRGCHTALISIREAWNGTVWFIEGDIKGCFDNLPHDTILRVIERHFHDTRFLKLIRDLLTAGYMEEWQYHATYSGTPQGGIVSPILANIVLHELDTWIEDTLIPEHSRGKLRQRNLEHLRLSQLEHQAWAEGNIPEGKYWRSQKWQQPLGKPHDPHYARLRYCRYADDFILGWAGSKQEALQIRDQIARFLQEELGLELSMEKTKLTHATTERARFLGYELKVSRDNSKTKTYRHRNGQMIKGRSVNGDIQLLVPQTVRTEWVSRYADGQDKAIKQMRWLHLPDFDIIAHFGGQWRGLVNYYALAMNVKTLSHVEWAMARSLQATLARKHNKKTRWVRKAYQTHENGKRAYVCKVPNPNNPDKPLKAIFGGLPLRTRRDAKLNDRMYVPFLVRTQLVQRLLAQKCEVCGNEGDAEVHHIRKLADLKRRWQHRKSRPFWVARMIEMRRKTLVVCKHCHWEIHNGTYDSQKVN

SEQ ID NO: 2211 - protein, 597 aa, synthetic construct
  source 1..597: note = MG169-37 reverse transcriptase
MQTADTVLNVIQQRGEKGLPLLNRSTYRLLYNPELFQLAYHNLASNKGAMTKGSTDETADGMSQAKIASIIEALRYERYDWTPVKRVYIPKSNGKTRPLGIPTWSDKLLQEVIRLILEAYYEPRFSTQSHGFRPDRGCHTALTHIEAAWHGTKWFIEGDITGCFDNIDHSVLLDILKRDIHDNRFLILIGNFLRAGYMEDWKLVKNFSGTPQGGVLSPLLSNIYLHELDEYVETELIPQHNRGKQRKQNAAYVRIYNKRYYWRKKGDYSRDKEFTAEMRSLPTGDQFDPDYRRLRYVRYADDFVLGFAGPKEEAIQIKENLATFLRDNLKLELNQDKTLITHAGTTPAKFLGYEIIVRKANDKIANGIRSMNGKLSLRVPKTAIDAYCDKYRHNNKPIARPELINDSDFAIINQYGLELRGIVQYYKLASNAHHLWRLSRFMERSLLKTLANKHKSSSRKMKRRFQTVNTTNDGKVLKCLMVVIPREEGKPPLKAMFGGHSIRRDRRAIPKDFVLKRYFPVRSDLVTRLLADKCELCNQHGNIEVHHIRAMRDLNVKGQKEKPEWIRRMAALRRKTLAVCRQCHHEISHDGSWKPRT

SEQ ID NO: 2212 - protein, 602 aa, synthetic construct
  source 1..602: note = MG169-38 reverse transcriptase
MRNPEIILNTLCSHSSDADYKYERLYRLFFNEELFMVAYERIKSKPGNMTPGSDGKTIDGMSLERINALISSLKDESYIPNPAKRVYIPKKNGKLRPLGIPTIEDKLVQEVARMILEAIYEGYFEDTSHGFRPSRSCHTALNSLQKRFTGSRWFIEGDIKGFFDNIDHSVLVDILRKRIADERFIRLIWKFLRAGYLEIWHYHNTYSGAPQGGIVSPILANIYLDQFDKYMAEYAENFKKGNKRKVNPEYDSLNKKLAKVRKKWKSETDETVKACLFERIKELQAKCLSVPAGLQMDANYRRLQYVRYADDFLIGVIGSKADSKSIKADITQYMSEKLLLELSAEKTLITHASENAKFLGFDITVQTLDDTKRNKRGVIQRMFVGVVKVNLSSETVRKKLIELGAVKFTQEKGKEVWKPKARTPMIGMKPHEMVAQYDLEIRGFYNYYGFANNSSEACAGFGYIMSYSLYKTLAQKLNSTVQGILAKYKKDKVFTVSYKDEKGKDRTRTLYNGGFKRRKPSEFDFCDRLPCTMYLPKATLADRLRSCICEICGAKGPLVMHHVRTLKTVNGDTPWGRQMLYRHRKTVAVCAECYAKIKESER

SEQ ID NO: 2213 - protein, 603 aa, synthetic construct
  source 1..603: note = MG169-40 reverse transcriptase
MEKSERVLKALSDHSQSSDYKYERLYRYLFSEEMFAVAYQRIYAKQGNMTPGTDGKTIDEMSLERIERLIVSLKDESYQPHPARRVYIPKKNGKKRPLGIPSFEDKLVQEVVRLLLEAIYEGHFEGTSHGFRPHRSCHTALGMIQKSFAGAKWFIEGDIKGFFDNIDHNVLINILRERISDERFLRLIRKFLNAGYVEDWKYNKTYSGTPQGGIISPILANIYLDKFDKYIKEYAAKFRKGDRRSINPEYWRLNNKKNWLKKKLQKTSDEQMRKSYLYEIAQLSKQMLSTPHKDAMDADFRRMQYVRYADDFLISVIGSKSECETIKADITQFMREQLKLELSDEKTLITHAQDKAKFLGYEIFIRKSDAVKRNKDGVLKRDFNGAVVLTLNSAVIQKKLTEYNALEVRNIDGKDIWWSKPRRYMTPMKPEDILAQYNAEIRGLYNYYSLAANVSKECASFAFIMKMSMLKTLGWKLNTSARKVRQKYQKDKDFVIPYNDAKGKQKYRVFYNEGFKKRNAQFDVDYDKLPQTMYVPYPSLVERLKDGRCELCGKEGKVVMHHVRTLTKLKGNNEWEKLMLKRHRKTLVVCEDCNSMIQNYGKE

SEQ ID NO: 2214 - protein, 605 aa, synthetic construct
  source 1..605: note = MG169-41 reverse transcriptase
MKRNPEKILNSLTQHSSDLAYKFERLYRLLFNEEMYYIAYQRIYTKQGNMTKGVDGKTIDGFCISHIERLIGTLKDETYQPNPSQRVYIPKKNGKMRPLGIPSFIDKLLQEVIRMILEAIYEGSFENSSHGFRPQRSPQTALWSIQKTFNNTKWFIEGDIKGFFDNIDHEVLIAILSERISDMRFLRLIRKFLNAGYVEDWVFHKSYSGTPQGGIISPILANIYLDKFDKYIKEYTQKFNKGKRRKENPIAKQLGQKKYYLTTKLKQAKNETERRLLLKQIGEVVKERLKYPASDEMDADMKRLKYVRYADDFLIGVIGSKEDCIKIKEDIKQFMADKLKLELSDEKTLITNARKHAKFLGYDVFVRKSNDTHRDKNGHLTRSLDHKIVLYVTTEVMRKKLLEYDAVKITVQKGKEVWKPKGRTYMRCLDDLEIISQYNSEIMGFYNYYSIANNSPVIDSFYNIMEYSMYKTYAAKYTTSKKKIIAKYKKNGVFSIPYTNKKGYEVRREFYDKGFKRKELPNRTLDDRLPNTVAITGGRNGLITRLNARVCENCGATDNLEMHHVRKLKDLKGKSDWEIKMISRNRKTLAVCSVCHHKIHSGKLD

SEQ ID NO: 2215 - protein, 603 aa, synthetic construct
  source 1..603: note = MG169-42 reverse transcriptase
MRVPRVVLDNLASKAKEKDYKYQRVYRNLYNVQFYLEAYSKMYAKEGNMTEGTDGQTVDDMSLERINKLIQRLEDQSYQPNPARRVYIPKRNGGKRPLGIPSFEDKLVQEVVRRILESMYEETFSIRSHGFRPNRSCHTALDQVHKTFTAVKWWVEGDIKGFFDNIDHHVLINILKRRIDDEKFINLIWKFLRAGYIEDWKLNNTYSGTPQGGIISPILSNIYLNELDRFVHKLKEEFDVGEKRSRNTMYRTACQRTQRLRAKYKTVWDDLNDEEKKVAAKEVKALAKDAQRFPTVDPYDDGYKRIQYVRYADDFLIGVIGSKDDAKEIKDKLTTFLRDELKLELSQEKTLITNSRNKARFLSYDIYVARDDSTRQCEDGNLRRSYNARVKLSVPMEKWRNKLLSLGVLEIDPNGKWNPVHRRELVNNDDLEILSIYNAEIRGFYNYYKLAFNVHTLSKFHYVMKYSMLKTYANKYKSRISTMKKKFSVDGKIAIRYETTKGLKVRFFYDEGFKKQELTNEGNVDNLPETVIYTSRTRLIDRLVARQCEYCGAEYVPIHMHHVRRLKDLKGKKNWERFMIARARKTLALCKTCHVDLHAGKLD

SEQ ID NO: 2216 - protein, 611 aa, synthetic construct
  source 1..611: note = MG169-43 reverse transcriptase
MAKGDRSLDVQGREVREMRNAETVLGVIQERGRRRLPLGDVYRQLFNPELFLHSYSRLYRNDGAMTKGVTAETVDGMSLGKIGGMIDQLRFERYRWTPVRRVHIPKKDGKTRPLGIPTWSDKLLQDVVRAILEAYYEPRFSDHSHGFRPGRGCHTALQRIKRVWHGTKWFIEGDIKGCFNNIAHAILLDILREAITDNRFLRLIQNILQAGYLEEWRHHPTLSGTPQGGTVSPILANIYLDRLDRFVEQTLIPEYTKGKRRAKNPGYNQMSGRACYCRKTGRVEEAKRLEQARRAVPANDPHDPDYRRLYYVRYADDFLLGFAGPRSEAESIRDRLKAFLAQGLRLELSEAKTLITHANTQKARFLGYDISVTQCNTKIGGNRRSVNGGIALRMPASFIADRSRFYMRDGQAIHRMERTHSSDYSIICQYQAEYRGFVQYYQLADNIAWLSSLQWVMRTSLLKTLAHKHKSTVTKMARRFATRVSTPFGPRVCLETSVPRVGKEPLIARFGGIPLRTSLTAYIEDLFLTRRRQGGTELLQRLLAGECEACGSTENVEVHHVRKLADLNRQGRKPPPDWVRLMASRRRKTLVLCRVCHDNIHAGRPLRSKTE

SEQ ID NO: 2217 - protein, 597 aa, synthetic construct
  source 1..597: note = MG169-44 reverse transcriptase
MRNAETVLGIIQERGKKGLPLEDIYRQLYNPDLYLRAYARLYSNKGAMTKGTTSETVDGMSLKKIESIVDDIRHERYRWTAVRRVYIPKKNGKMRPLGMPTWSDKLLQEVIRLILEAYYEPQMSDHSHGFRPRRGCHTALCEVKRVWTGTKWFVEGDIKGCFDNIDHEIMMSILREKLHDNRFLRLMEGLLKAGYLEEWHYHRTHSGTPQGGVISPMLANIYMDRLDKYVENVLFPAYNRKERRRVNPDYKRILDKASKLRKKGKKKEASMLRKQQLQLPYYDPNDEEYRRLRYVRYADDFLLGFAGPMAEAEDIKEQLRIFLHDQLKLELSQEKTVITHARTSAARFLGYEIAAQFANDKLDPVRRERSVNERIELRVPADVVKKNCAEYQAQGKPIHRKELTTESDYAIMEKYQWKYRGLMQYYALAMNIARLQTLHWVMRLSLLKTLASKQQATVNQMVKKYQTDMETPYGTMKCLEVRVERDGKKPLIARFGGIPWRRQNKAILLDKPSLPIVTPRNEIVKRLLRDTCEMCGSKENISVHHVRALNDLKVKGRKEKPLWVQKMAAMTRKTLVVCGYCHAAIQTGKPTRQPIQG

SEQ ID NO: 2218 - protein, 612 aa, synthetic construct
  source 1..612: note = MG169-45 reverse transcriptase
MRKGAKCSMQNSEIVLYNLSKQSMKDGYTFDRLYRHLYNEDFYIKAYTKIYKNKGSATKGIDEETADGFGEENIQAIIDTLKNESYQPKPIRRLHIPKKNGDTRPLGIPTFTDRIVQEVCRMILEAIYEPKFSNHSHGFRPKRSCHTALIEMKKTFTGVNWFIEGDIKGFFDNINHQILITILRKRIKDEKFIRLMWKFLKAGFVENWRFQKTYSGTPQGGIISPLLANIYLNEFDDYIEKELKPSFDLGEPKKRKRNTEYRKYDMRNQRLHKKINATEDEVLRKEMIEEYKANKKILLNLPYYESNTDTYKAIKYVRYADDFIVGVNGSKEDCEMLKQAMKDFLQNYLQLELSEDKTLITHSTKFANFLSYDISISNDLSTAKDKNGVIKRKYRGYVQLRIPKGTIEKVIVKNKMVKDIDAKQWDMLHRPRLVGLSDLEIIETYNAELRGLYNYYALAENVNRKMWQLRYVMEYSCLKTLANKYKSSVAKMKVKFKQGKYWGVKYETKQGERIAYFYKDGFEKKKESVRATIDELPNLYVYQGRNDLEKRLSASQCELCGDNHPDTKFEIHHINKVKNLKGKEYWEWTMLAKQRKTLVVCDKCHKEIHKQR

SEQ ID NO: 2219 - protein, 605 aa, synthetic construct
  source 1..605: note = MG169-46 reverse transcriptase
MQNANTIYAVMQERGKKGQPVERLYRMLFNKELYLQAYAKLYPNKGAMTPGVTPETADGMSMEKIDSIIEAIKHERYQWTPVRRTYIKKANGKQRPLGLPTWSDKLLQEVIRFILEAYYEPQFSDFSHGFRPGRGCHTALVKVQKTWTGVKWIIEGDISSYFDTIDHSVLLDILREKINDNRFIRLIEGLLEAGYMENWQYNKTYSGTPQGGVLSPLLANIYLDKLDKHVEEAIKVFDKGTKRAPNREYASISGQKRRAVRKGAKELAKGLTKRLRNLPSVDPNDPNYRRLMYVRYADDFMVGVIGTKVEAEEIKQRIGNFLMGKLKLKLSEEKTLITNAAQETARFLNYEIKNQNSDTKLIETIHRVKRRSVNGRIALLMPKSVFEKNSKPYLKKGKTASVPHLEINSDFAIVTEYQAKLRGLYQYYALATNVSRLNHLQWVMEQSLMKTLAAKHKSSAHAMYMKLATKVQTDKGKSLKCIQVTVERDGKNPLIARFGGFSLERQRVWEIDDKTPASMNHLGTHTEILQRLLADRCEVCGSTDKIEVHHVKKLSEVQGPKNERTDWKKYMASRQRKTLVVCKKCHQAIHAGKPLPALANHRRAG

SEQ ID NO: 2220 - protein, 600 aa, synthetic construct
  source 1..600: note = MG169-47 reverse transcriptase
MRDSANVLNSLAGHSQDPNYKFERLYRLLFNENLYALAYQKLSQNAGNYTKGTDGQTIDGMSIKHIHSIIGQLKDESYRPCPARRIYIPKKNGKQRPLGIPAFKDKLVQEVVRMILESIYEGHLEDCSHGFRPHRGCHTAMASLQKGGTGARWFIEGDIKGFFDNINHDVLIGILAERINDERFLRLIRKFLKAGYMEQWEYKNSYIGTPQGGIISPILANIYLDKLDKFMRNYINVFNKGKARVRNPEYKRVANRKDKRVKKLKNETDEQKKEALRREIAILHREMQQLPATLDMDENFKRMRYVRYADDFLICVIGSKEDCVKAKGDIKTFLQDTLKLELSDEKTLITNSHDAAKFLGFDVTVRSMDKTRKDFRGIPIRSLDHKVVLLLPYEVMRKKLLDYNAMRIIIKNGKEAWESTSRPYLRSNDDLEILNRYNSEIRGIYNYYCIANNVNILNSFYYYMKESMYKTLSSKYESTVRKIIRKYCRNKVFTVRYENNKGEMLERTIYHGGFKQRKDARIDNAHIMPSYRGTESTSLMARLKARECEYCGAEDNLRMVHVRKLKDLKGKQEWERFMIARQRKTIAVCENCYRKIHEKK

SEQ ID NO: 2221 - protein, 608 aa, synthetic construct
  source 1..608: note = MG169-48 reverse transcriptase
MRNPIHVLKYLEEKATCKNYKYERLYRNLYNPEFYLIAYQNIAKSQGSMTPGTDGITLKGMSLERINKIIVKLKDHSYQPNPVRRTYISKKNSKNKRPLGIPSTDDKLIQEVIRMILEAIYEPTFSDNSHGFRPKRSCHTALIQTQHLFKGTKWIVEGDIKACFDSFDHHVLIDLLRKRINDECFINLMWKFLKAGYMEQWEYHKTYSGTPQGSGMSPILSNIYLSEIDLFMEEYKKSFDLGVTGKRKVTSEYNSVQNRYFRLLTQYRESKSTLNADELKILLKEIKQLQKKRLMLPYNLNIDPNFKRIQYNRYADDFIIGINGSKADAEKVKEDIKVFLRENLKLILSEEKTKITHSAERCRYLGYDISISRSKAYKRLENGVLRRTLYGAVQLLVPSEKWISKLREYKTYKVIKGENGKEWWKVLHRGSLLNKKDVEIVSKFNSEIRGIYNYYRLAYNASSLNNFYYIMKRSLQKTFASKYSTTVSKIRNKYEKDGVFCVQYSTNSGLKTCEFYHEGFARKSEIALEWIDNLPQYKKYDKPNTLGNRLKQKTCELCGSRCNEIKMYHVRTLKELSDTKPWEIKMKAIRRKSLATCTNCFETIQNSK

SEQ ID NO: 2222 - protein, 580 aa, synthetic construct
  source 1..580: note = MG169-49 reverse transcriptase
MRNPINVLNSLQQHSSDKSYVFERLYRNLYNRDLFLLAYQNIYSSQGNMTQGADGKTIDAMSLNRIDGLIASLKNESYKPQPSKRTYIPKKNGRMRPLGIPSFDDKLVQEVVRLLLESIYENSFSRNSNGFRPNLSCHTALTQIQKTFTGVKWFVEGDIKGFFDNINHDTMIGILSKRIKDERFLRLIRKFLKAGYLENWQFHNTYSGTPQGGIISPILANIYLNELDKYVEKLKAEFDKGKRRRAFPQSTAIAKQRKKLINAMQTSNDENEKRFIAKQIAELDKEKLNVPYSDPFDDNFKRLVYVRYADDFLIGVIGSKQEAKQIKEKIKIFISENLKLELSDEKTLITHSEKKARFLGYDIFVRHTNATKTNSLGYTRRFLSGTVCLEMPMEIMRKKLLDYNAMEIVKTVKGKENWKPKARSYMINNDDLEIIEQYNSEIRGFRNYYSIANNSAYAGSFGYIMQYSMFKTYAGKYRTSMRKAISKLRIGKKFGIEYTDKNGRTKTRFFYNDGFARKPMQRKAKLDNIPNTVKYSAKTSLMDRLSARQCELCGKTNTDIEFIISENSKISKVKHSGSVL

SEQ ID NO: 2223 - protein, 599 aa, synthetic construct
  source 1..599: note = MG169-50 reverse transcriptase
MQPTTDILARISRNSLANKDEIFTRLYRYMLRPDLYFVAYKNLYANSGAATKGANDDTADGFSEAKIAKIIQKLADETYQPTPVRRTYIQKKNNPKKKRPLGIPTFTDKLVQEVLRMVLEAVYEPVFLPVSHGFRPKRSCHTALKSLKREFNGMRWFVEGDIKGCFDNIDHDVLVGLINSKIKDARMMKLIYKFLKAGYLEDWKYHKTYSGTPQGGIISPLLANIYLHELDKFVMKLKSEFDTHGQEPVRTEYRLLSNEIQKLSYHIGRSTGAEKERLLEEYNQKRKLMLKMPCTAQTNKRLKYIRYADDFILGVKGSKEDCQWMKSKLSEFISGTLKMELSEEKTLITHSSECARFLGYDVRVRRSAVIKHGGPGNKTKRTLNNSCELAIPLDDKIHKFIFANKIAIQKPDGKLMPVHRASLLRLTDLEIVSAYNAELRGICNYYGIASNFYKLCYFSYLMEYSCLKTLAAKHKCTISKVVKKFKDGNGKWGIPYETKTGTKRCYFAKYSDCKGKADPTDTVCNAAVEYGYCRTALEQRLKAKICELCGTTESDCYEIHHVNKLKNLKGKKAWEIIMIAKRRKTLVVCKKCHIAIHNQ

SEQ ID NO: 2224 - protein, 1242 aa, synthetic construct
  source 1..1242: note = MG176-2 reverse transcriptase
MANRPAVRTTSPCSTEELNAGIHAAAPPKRVRQSDDATCSQEGLDADVNLVHQGRSDLWKDSEAEELRELVGLNTNSKGLISWVRVLEAWKSKGLCERTKGSLMAKWQGLKNKAARELVLDDTNVAQRGTGKSSPVRGTLDSSVSVVLDTRTPNTVVQAVNKGNGNTRPQDHCDDTAAAPIDPKLKEDIRTVFKEKLKLSKRLGCKPNLRKSPARVTGKVSRSLISEVDNLIDGELGSKTGRKLSWRWLSIVVYAAALTVSEIEGRQRIERSQKTKEWFKNSYKEVERLRSIIGKSTAELNRRSSGIDPTSKQNSNIAMLRKRYGVETFADITSLVGKLKERLKLLRSRIALRKEDQRRQRVRITPAKVLFRSKSDPSGGGDKLNIEDVRKYWKGIVGRAKSFDCRNEDLVAWSATLEGVKTEEDFGDSLSQDLWGEATKKARSWKAHGPDGLQGYWWKAFRSANAALYHLARRHLTSGDALPEKWISEGRIILLYKSGSKEDPSNYRPIACLNTCYKLLTSYITLFVDRHVRSNNILPREQVALQKRSWGCTHALMLDQTLVSDAQYQKQRPISLAWIDYAKAFDSVPHAYIKWLLKVVKLPKTLRTFVNRLLGSWQVKYEARDSSGRTHRSNILEIKSGVLQGDSFSPLLFCLAMAPISHALNSTLIGYQTATGKTQRLQLKLSHLFYMDDLKLYADSSENLSILIKKVETTSTAISMKMNTKKCAKAHFTPRRMRDEDEDDGPNSSGTDGNIPTLEGSSTYKYLGIEQTFGVQETDTWDRVEEKCSAVVQQIWESDLTFRQKVNSYNTKVIPALRYVVLNAVKGSGKYQGVLLRGEQFDKKIRRLLVENKVRYKASCVARLYLTAGLGGYGLKSVKDSVMEATIYSWAYLCTRNDLRSSLNLFSSMSKRGKRSVISDAEYVLKSYRITAELTPNEATVKVSGVKFTDARELARHVISVIRTENDTTRRKEWEVKELSGRVLRSDSLDMQASFVWLQAGKLSSTTVRNVIAAQEGCLLTRAHPSCIEADKLCRACNKSLETIEHVLAGCSKWLTTLYIDRHDSVARNLHYRICEKYELKPPHYSQRVESIMENDRVKVYWGQPVQTKSIIRHNKPDIVIFEKATRKCTIIEFAVSWFTGITRQVDIKTNRYCVNGNWEEDLQLPYPRGDNLLRELQTEGWKVEFLPVVIGTCGEVLGGLAGQISEKLSISTDKAGDCVERMERSAVLGTSRIIKNHLGLR

SEQ ID NO: 2225 - protein, 338 aa, synthetic construct
  source 1..338: note = MG198-1 reverse transcriptase
MKALWQWLQTRAGIAPRDQATMTCYAPPKTPQTAAPLDIARSDAMAVAPPVTRSQPPERLFTHAALHQAWRAVKQAKGGPGVDGVTIAQFEARLDEELMALQKELTAGAYRPRPLRQVLVPKAGEGMRGLAIWALRDRVAQRVVYDLIAPVFEPHFLPCSFGYRPGLGVEQAVQRVIDHRNANLRWVVDADIMHCFDAIDSRRLFGMVRQRVRDRLVLRYIEQWLQVQLLSSLDGKPRRAGASQGSVLSPLLANIYLHSLDQALTARGLALVRYADDFVICCRRRADAQSALSQAQAALQRLGLELHPQKTQIVHFDQGFAWLGHFFIRNECHRLAGG

SEQ ID NO: 2226 - protein, 289 aa, synthetic construct
  source 1..289: note = MG198-2 reverse transcriptase
MRNRSPFVPWQSAFSVDGLRRAWLAVRAAKGRGGSDGKTLAEFERRLDANLNELREELITGKYRPHTVTQILVPKPGGKWRPLKLWTVRDKVAQRAVYNYLEPVFEARFLDCSYGYRPGRSTADASRAVSKARQEGAVWVLDADIKDCFERMRGDLVMQRLARWQTPRPVRELVRHWLNARIWNTWEGSPSTAGTSQGGVISPLLCNLYLHPFDQAMQKKGIYLVRFADDFVVLGPHQPAVRWAQRRAGAKLKGLGLEMNAHKTRITSFEEGFQFVGWFFIRDEVYQLK

SEQ ID NO: 2227 - protein, 318 aa, synthetic construct
  source 1..318: note = MG198-3 reverse transcriptase
MNPRRWWERIREIGSTAVPEDPSGQQRERRRFRGHRRQPHHPAFTPDAVHRAWRRVRANGGGAGVDGVSIAAFEKDLENQLESLRQELATSTYRPRAVRRVFVPKPNEGLRPLAIWALRDRVAQRAMYDYLEPFFEPEFLGCSHGFRPGRSVDTAVHAVLSARDVGLRWVLDTDIKDCFDSIDAKQLVKQVKHRVKDRTILRLLDQWLSADILDARGRHTAAGAAQGGVLSPLLCNIYLHPFDVAMTRRGVHLVRYADDLVCLCRRKREAQQAHRLAQQSLSPLKLELHPQKTRIVHFDQGFKFLGVFFVRNEHFYLS

SEQ ID NO: 2228 - protein, 294 aa, synthetic construct
  source 1..294: note = MG198-4 reverse transcriptase
MLILSLLRLLGLFHRRSPSLRDQLLDMANLRQAWEVVRTRHQGPEPYARYIARFGRRLDTNLHALRRAVSKGNYRPRPYRFIFVPKSDGGLRPLAVPAVEDLVLQRALYNVIGPIWEPYFLDCSFGFRPGRGVEDAVMRVAAYRDEGYRWVVDADIKRCFESFDHKILFALLRRHIRDAFILKLIWACVAAGGNGRRGMGVPQGAPISPLLCNIYLHEFDQRIVTRFPRLVRYADDFVILCRDMEEAQRALEEARLALEALRLSLHPQKTRITHFRLGFKFLGVFFLGDRIYPL

SEQ ID NO: 2229 - protein, 296 aa, synthetic construct
  source 1..296: note = MG198-5 reverse transcriptase
MGWWRRKRTKEGKRQAEALFSPEALRRAWQVVRRKGATPGVDRVTIRQFERNRDRNLAQLRQELVGGTYAPLPVQRVLVPKSRGGLRPLAIWTLRDRVAQRVVHDYLVPILEPHFLDCSYGFRPGRSVADAVQAMIEARDAGRRWVVDADIEDCFGSLDPRRLVRQARAWVPEPLVVGLIEKWLRARVYNPARGQPATAAASQGGVITPLLANLYLHSFDVQVTNVVSYGTLVRFADDFVILCQRRREAGTALAAARQALGRVRLRLNPHKTRLVHFDQGFKFLGVFFLRNEHFYL

SEQ ID NO: 2230 - protein, 290 aa, synthetic construct
  source 1..290: note = MG198-6 reverse transcriptase
MPVGSLLQRRESPGRLFSMNAMRRAWNQVRRGGKSPGTDGMTLDAFEARLNLELNRLRQQIIGGTYQPQPVRQFFIPKRSGKLRPIQVWSVRDKVAQRAVVNIITPLLEAQFLECSYGFRPGRSVGMAVDAVTQGRDTGYGWVLDADISDCFGAIDLKLLMGQVERLIDEEPVVRLIQQWLHTPVDGELGIVAGVSQGGVISPALANLYLHRFDQMMLASLPQSKLIRFADDFITLNTSEEAASWSLDVARRSLENLRLQLNMRKTRIVRFDEGFTFLGYQFNKNIVEKG

SEQ ID NO: 2231 - protein, 297 aa, synthetic construct
  source 1..297: note = MG198-7 reverse transcriptase
MSPHKMDTDPPPEQLFSLAALHRAWRLVRRSGPSAGTDRVTPHEFEQRLEDELTQLRHDILSGQYRPKPVNRFYLPKPNGRRRPITLWSVRDRVAQRVVLDYLTPILENVFLDCSYGFRPGRSVADAIGAVIQARDRHLRWVVDADITACFDSIPPELLLPQVRSLVSSVVVMRLIEQWLNTPVYKHAHIRAGVSQGGVISPQLANLYLHRFDQMIQAALPEVTLVRFADDFVILCRRKREAWWSLTVAQRSLGNLKLYLNMEKTRVTHFDEGFSFLGVTFKGGWHSPLPGHPSITE

SEQ ID NO: 2232 - protein, 333 aa, synthetic construct
  source 1..333: note = MG198-8 reverse transcriptase
MSDLIKNLITIPNLEAAWQRVLANGGCRGSDGINLQRFGFDLIDHLRDLSHSLEHGYYHPYPLLRFPIPKKSSHQLSVVSNQSAPLNPDHRSLQTAHRFLSVPTVRDRVAQTAAFLVTKEIFEAEFEDVSHAYREGRGVRTAVYDIKEWRDKGYRFAVDADITAYFDNVPHDPLLARLEKLIPDPAMLRLFEKWVKVEVYDGTKIWTLDKGIPQGSVVSPALANLFLDVLDETLMSFGMKLVRFADDFLILAKTEKAAEDAIELTDMLLDDMQIDLNPLKTKIVSFDKGFKFLGAIFLGDGIFLPFPQKREQGPPPKLPPPLTLRRYLELKNK

SEQ ID NO: 2233 - protein, 309 aa, synthetic construct
  source 1..309: note = MG198-9 reverse transcriptase
MLDEILARDTLRQAFWRVRENHGCRGADGMTVHGFEADLDREVDRLQDRLLRRCYHPFPLLEIAVPKRSGNSRRLCIPTVRDRVAQTAMDLVVRPVFEAEFEDCSYAFRRGRSVRDAVHKICELREQGYRWLLDADIHDCFDSIPHDRLLARLAELPLDEDVLRLFESWIRTEVYDGRRLHTPGCGIPQGSVVSPLLANLFLDQLDETFMLFEQVVIRYADDFLVLCRDRDRAEGALEVTDALLDGLGLTLNRAKTAVTSFEHGFKFLGALFVEDEVYLPYSRHKEETQPPSLPMPLDLWTYLELKHGG

SEQ ID NO: 2234 - protein, 311 aa, synthetic construct
  source 1..311: note = MG198-10 reverse transcriptase
MRINVNSVANRNSLVSAFQRVKENHGCAGVDRVTIESFESGLNRNLSILLHEFESKTYSPLPLIKILVDKGNGEARKLCIPAVRDRVLQAAVLCNIGPILEKEFEECSFAYRKGRSVRQAVYRIKGYYDEGYRWVVDADIDAFFDSVDHELLIAKVKGYIKDKDILGLIELWIKAEVWDGESVKVIDKGIPQGSPISPILANLYLDELDEAMLKQGYKYVRYADDFLVLCKTEEKAKQSLEFTDEILDKMFLELDEADVVSFDHGFKYLGVIFVKSLIMTPFNKPKRERKVLFMPPPLNMATYLLKKKKGW

SEQ ID NO: 2235 - protein, 315 aa, synthetic construct
  source 1..315: note = MG198-11 reverse transcriptase
MNNTNEFNISFQSLFTAFQAVKENHGCAGADRVTIEQFEGNLDINLRIMQKELVEQTYSPLPLLKILVDKGNGEARALCIPTVRDRVVQAAVLQIIEPILEREFEECSFAYRKGRSVKQAVYKIKEYYEQGYHWLVDADIDAFFDSVDHALLLEKFKKYVSDLYIQKLIELWLKAEIWDGKSLIVPQKGIPQGSPISPILANLFLDELDEAFLKKGYKIVRYADDFIILCKKPDEAMNARQLSKQTLEKLHLQLDEEQITSFEQGFKFLGVVFVRSMIMVPFDRPKKERKILFYPKPLNLDEYFLKKGITSPLNR

SEQ ID NO: 2236 - protein, 318 aa, synthetic construct
  source 1..318: note = MG198-12 reverse transcriptase
MSDMSLFERIATVATLHAAFARVRDNHGCAGADGVSIAEFERDLDVNLFALAEALGSGTYRSFPLLRILVARPDGAARQLCIPNVRDRVAQAAALAVLSPLFEAAFEACSFGYRRGRSVRDAVRQIKQYCEQGYTWIVEADIDAYFDTIDHALLLARVRKLIDEERIVRLIEQWVQPQVWDGSQLYRLERGISQGSPISPALANLFLDDLDEALLAAGQKLVRYADDFVILCKDHGQAERAARLTDTVLDSLHLELDDVAITSFDAGFTFLGVTFMRSLILEPYDRPKHERKVLFMPPCLNPTELDRLITEGAGARRE

SEQ ID NO: 2237 - protein, 312 aa, synthetic construct
  source 1..312: note = MG198-13 reverse transcriptase
MLSQVAQLANLHAAFGRVAEARGGAGVDRLTIGAFRKNLDLNLASLASELTSATYQPLPLLRFLVAKPNGSPRALVIPAVRDRVAQAAALNILEPIFEARFKEVSFAYRKGRSVKHAALRVKALRDKGYRYLLDADLDDFFHQIDHERLFARLSQIVPDPGLLRLLRLWVRAEVYDGRQVYIMEKGLPQGAVISPLLSNLFLDEFDEALLARGFQLVRYADDFLVLTKTRAEAEAALHASQEILTRLRLSLDPEDTQITHFDEGFKYLGLIFFKDAILAPFDRAPKKNQILYMPPPFDLKAYLARKKSPSLR

SEQ ID NO: 2238 - protein, 310 aa, synthetic construct
  source 1..310: note = MG198-14 reverse transcriptase
MWILGGMRTRAQSSTDRKPVSRKVGAVQGGLHRRMFAMECLREGWRRVRINGGGAGGDGQTLEDFARRLEEELRRLHAELQRGAYRPGPLRPARMPKADGSWRPLRIPCVRDRVVQAACQMQLLKRLDGAQHERSFAYRPARSVEMALARLRQDLEEGHVWVVDGDIEKFFDNVEHARLLKELKRLGLERRVRRLIGLWLSGFGAGGRGLAQGSPVSPVLANVFLHPVDAALQAHGVRFVRYADDFVLACRTRRAAEDAWRLAVRLLAGRGLRLHAGKTRIVPAAEGFVFLGQWVRLRVEMTKVKTKGRE

SEQ ID NO: 2239 - protein, 295 aa, synthetic construct
  source 1..295: note = MG198-15 reverse transcriptase
MSVWQSWRQVFRSQRRIRVYEGTRLEDIARLETLAEAWGRVRSNKGGPGVDGVSIADLAPAIEASLEALSAALLAETYRPHKLRRAFIRKPDGGRRPLSIPVLIDRLAQTAAMLALEPEMDARMSETSLAYRVGRGPPQAIAAVERAFAEKLVWTLDADIERYYDRIWHRQLMTDLAIWIDDERILRLLLRWLRTFGWRGRGVAQGAPISPLLANLYLHPFDRLMAVAGWRMVRYADDFVVLTRSEAETKRAFKDVERLLRGRGLALNKDKTRIVPPGEGFRFLGQNLTAIGGLV

SEQ ID NO: 2240 - protein, 269 aa, synthetic construct
  source 1..269: note = MG198-16 reverse transcriptase
MLDTITSHARLHAAWRRVRRNGAATGGDGETAAQFAARLEARLERLRADLRHGRYRPGPLRRVALARPDGRTRTLRIPGLADRVVQTATQAVLAEHLDTWMSPDSFGYRPGRSVDQALARLRGRALGQRYVLDADIHAFFDCVPHDRLRDELGIWITDPRVRSLLELWITGFGGRRGLAQGAPISPLLANIFLHPLDAAFAREGISHVRYADDFVALARDRREARAARRLAAGVLARRGLELHPDKTAIRPLAEGLTFLGERLIFETGP

SEQ ID NO: 2241 - protein, 284 aa, synthetic construct
  source 1..284: note = MG198-17 reverse transcriptase
MPGSLARAMTGIADAGTLHQAWRRVRANQGGPGGDGESIAAFGVALDRQLETLAAELISGRYRPGPLRRVAIPKPDGGQRLLAIPCVRDRVAQTAALLVLQPVLETLQSDASFAYRPARGVADALASVRRAHARGLVWTLESDIAQCFDSIPHARLIGELTIWIQSERTLRLIATWLEGFSRDGRGIAQGAPIAPLLANLYLHPLDRLLVAAGHTPVRYADDFVVLTRDRHEVEHASGLAEGVLVERGLAMKPDKTRIVPPGVPFRFLGEVLRAPARAGLRLLR

SEQ ID NO: 2242 - protein, 290 aa, synthetic construct
  source 1..290: note = MG198-18 reverse transcriptase
MGKLLSRAVSPEIMNVAWKRLRGDNAVWRSGVSRSGMERDLVYHLLKLSDELRSGDYLPDPVRFFPVNKGDGKQRIISALTLRDKMAQRTVLSALEPLGEKLFHHDSFAYRPGRTIDMALSRVREYMLCGLNWVVDGDIQGFFDNIPHGPLVKILKLHIPDREMVSLIKRWLEVGAAKRGFMSASRGIPQGAVLSPFLGNLYLTSWDNDLAAHNLPFVRFADDFLVFAKSKDDAQRAMAYVEKRLKRLGLILNPQKTRVVACGPHVTFLGRKLPRLKSQNISAHPERQKS

SEQ ID NO: 2243 - protein, 279 aa, synthetic construct
  source 1..279: note = MG198-19 reverse transcriptase
MARLLESMLSPVVLDNAWRRLRGDQTVWAPGLSRAEMERHALKHILELVEEVRSGNYRPAGLRRFTVRKPNGGRRVLSALTLRDKLLQTAALLVLTPVAERRFHPDSYGYRPGRSVEMAFGRACERIHCGLDWLVDADIRSFFDEIPHRPLRRLLRRFVRDRALMELMEQWLAVGYAQSSLFGTRKGIPQGAVLSPLWCNLYLDRMDRDWDRRNLAFVRYADDFLLFTPDRRSAERALEWTGGRLARLGLELHPEKTRVTRTGPHVVFLGRNLPRRVKG

SEQ ID NO: 2244 - protein, 281 aa, synthetic construct
  source 1..281: note = MG198-20 reverse transcriptase
MLGRDELLEQVLQPDVLDEAWRRVRNEHTPWSKGVDRDQLEQHLLLHVLSLVDDLRGNRFRPEPLRQFTIPKTDGRKRVISAQYLRDKLLQRAILIVLEPKAERMFHVDSYAYRPNRGVQDALKKARERINCGLDWLVDADIRSFFDQIPQTPLKKKLKAFANDRTLLGIMDLWLKQGAHHTSLLGTDRGISQGAILSPLMCNLYLHEFDLALEKANIPFVRYADDFLLFTSNKALAEKALDHVRRILAKLDLELHDGKTRVVRSNPDVVFLGERLPNPKR

SEQ ID NO: 2245 - protein, 278 aa, synthetic construct
  source 1..278: note = MG198-21 reverse transcriptase
MSHLLEQAMSPDNLNISWRRLKKEHTPWSLSVSRDELQRDLLKHLLECRQQVLSGAYKPLPLRQFPLRKPNGKQRVISVQYLQDKLIQRALLTVLEPKAEAIFHEDSYAYRPRRGVALAVKKVKERVRIGQDWLVDADIEQFFDSIPNAPLIKILKKFVNDNEAMSLIELWLKQGAHHSSLFGSRRGISQGAVLSPLFCNLYLHEIDSALTKANIPFVRFADDFLLFSNAKNKAEKERDFAEKQLDKLGLKLHPDKTQVVRSHSQLRFLGETLPNPNR

SEQ ID NO: 2246 - protein, 320 aa, synthetic construct
  source 1..320: note = MG198-22 reverse transcriptase
MKTSLLEQAMAPDALDAAWRRLKTEHTPWSPDTSRDELQYHLMRHLLECREEVLGGRYRPLPLRQFPMHKPDGRIRVISIQYLKDKLVQRAILTVLEPRAEALFHDDSYAYRPSRNVDRALDKVRERIRIGQDWLVDADIEKFFDSIPHRPLVKILAAFVDDRPTMRLIARWLDQGAHVKSLLSTTRGISQGAVLSPLFCNLYLHRFDAALASAKIPFVRFADDFLLFAPAREQADKALAYAARELERLGLTIHPEKTRVVRASREVSFLGQALPNPTPEVKPPVPDPKSRLSHLIYTPDRRNILSRPRKSRVPGGAPPT

SEQ ID NO: 2247 - protein, 281 aa, synthetic construct
  source 1..281: note = MG198-23 reverse transcriptase
MTTPTLEAALSPANLDRAWRALNGDQAHWLPGLPREQMEPHRLRYQLALIEDVRAGRYQPEQMRQFAIPKADGGQRVLSALYLRDKFLQRAVMQVLEPLGEQLFHPDSYAYRPRRNVAMALQRCRERIRCGFPWLVDADIRKFFDEIPHRPLLKAFDAVVADRALRKLVRQWLACFASTRSLFGGDRGIPQGAVISPFLCNLYLHQLDQAWQSERLPFVRYADDFLLFAPDQALAERALAFTKRQVERLGLALHPEKTQVVRAGPSVAFLGQRLPRPPADP

SEQ ID NO: 2248 - protein, 279 aa, synthetic construct
  source 1..279: note = MG198-24 reverse transcriptase
MGDLLRKAASPEILNLAWKKLKNDKSVWDEGISRNDMEKDMVFHIMKLSNDLKTGQYRPSQIRMFPVKKADGNKRIISAFTLRDKLAQRAVLSVLNPIGESYFHQDSYGYRKGRSIDMTMGRVYEYVRCGFEWVVDADINSFFDSIPHGKLMKIIKKYFKDDEMVNILHKWVDTGSPRTGILQKRRGIPQGGVISPFLCNLYLTEFDNYLSKKNLPFVRFADDFLVFTKKGKDAYSALETVQLGLKKIDLKINPDKTKVLRSGPKVVFLGRKLPFIHNK

SEQ ID NO: 2249 - protein, 288 aa, synthetic construct
  source 1..288: note = MG198-25 reverse transcriptase
MLSLRTALCQSENLGGAFARYRRYRGLWTPNSPMFTVASAPVVPMLRLADELRTGRYRPMPPHVMSVAKANGDRRELRVFAIRDRVAQRALLQVLQARTDSEMSPCSYGYRPGRSVAGALARIRSFLDQGLSWVVDADVERCFDSIPRGPLLEEVTRRLHTPEAAELVAQCLGWESSEERNKVGIPQGAVLAPWLCNVYLWQLDDAMHAEDAAMVRFADDFVLLSGVRPRAEALLQRCAEVIEQMRLRLHPVKTAIIDTARPFRFLGQWLITTPLLLRGPATDGGTCP

SEQ ID NO: 2250 - protein, 282 aa, synthetic construct
  source 1..282: note = MG198-26 reverse transcriptase
MGHLLEKAMSPAVLDHAWRLLRDDRGVWRRGLPKADMERNVIRHVGTLAEDVLSGRYQADPMRCFEIAKADGGRRLIAAPTIRDKLAQRAVLTVLEPLGEALFHNASFGYRPRCTREMALSWLREWVRRGWAWLGDADIQNCFDAIPQQGVLEFLWILCEDAEILALARQWLDSIPPRFRLGAPGCGLPQGMVLSPFLCNLYLHALDERLDEECIPFVRFADDFIVMGRNRDEAADALAVAADQLGALGLALNPAKTQVMLSSPKHQFLGCRLPDGRPRFQP

SEQ ID NO: 2251 - protein, 282 aa, synthetic construct
  source 1..282: note = MG198-27 reverse transcriptase
MSDLIQQIVSPSVLNHAWNHVRKDRARWNQELTMADVEQDLPLHIGRIADELLSGTYRAQSLRCFEIAKVNGEARTICAPTVRDKFVQRAVLTVLEPIAESYFHPCSFGYRPLCTIDMALAKVREWVRQGYTWLGDADIFQCFDSIAHTAVLKWVDALTEEPRITALIDDWLNAVPDQYRPYGAGFSLPQGQVISPFLCNLYLHEMDMDLEEAGIPFVRFADDFIVFGSDQATAEQALATAGASLERLGLRFNEDKTHVIQSSRKHQFLGKRLPNANVRFIP

SEQ ID NO: 2252 - protein, 279 aa, synthetic construct
  source 1..279: note = MG198-28 reverse transcriptase
MGKLLEKAASPPVMNHAWRWLRNDRGLWDRKLSMETAGWNIVRHVGELSAALLDGSYRPAPMHCFTVNKADGGTRTICASLVRDKLAQRAALTVLEPLGEAIFHPDSFGFRPQFTLDMALARVRERVRAGRVWLVDADIRQCFDSIPQAAVLKQLQRLCGDKELVRLWIESMPAEFLPFGKGVGLPQGMVLSPFLCNLYLHQMDLFLVGKGVPFVRFADDFLLLLPDQAAAERARGLVAGCLKSLGLELHPEKTRVARSSPALRFLGKRLPDGRPRFSV

SEQ ID NO: 2253 - protein, 323 aa, synthetic construct
  source 1..323: note = MG173-4 reverse transcriptase
MKERAFAEEEISACCNYASVLLSKNLPVLFDAQHINIVLQLHKINSAAYHTFTIPQAEKFRTITAPSKPLKQRQKWILQEILSKVDVSEYAHGFEPGRSIKTNALLHANHAYAVCMDIKDFFPSVHYDSICNVFLSIGYSSSAAHLLADICSYNGALPQGAPTSPKLANIIFSPLDEKLAAIAKEERAVYSRYADDLTFSGDHDLKIIYARVKNLLERYEFRLNEEKTHSYGPGVPKRITGLVVQNGTVRVPKYFKRSLRQEIHYCLKYGVLTHLENVKSTHCINYREYLYGKAYFIHMVEPQEGNRYLEKLDQIDWPSSFLV

SEQ ID NO: 2254 - protein, 337 aa, synthetic construct
  source 1..337: note = MG173-6 reverse transcriptase
MENYSHLLATKMRESSYSEEYIKLCVHYVNRLEANKATIIFDPDHLSLLSGYSKKRINSLIRNRQDNYRKVGIKKKSGGHRVLELPEEDLKNLQQWILANILENIPVSRYSKAFKKGLSIIDNAKPHLRKECVINIDISNFFWSISAKSIHKLFRKLGYTKEMSSLFTKICTFNNHLPQGAPTSPYLANLVCKSLDSEIIRILKGKKISYTRYADDLTFSGNKDMVNYLDQLQAIVRSQGFQVNDSKTRIQYSNQRQLVTGIIVNRKLSVPKELTKKLRQEIHYCKQFGVNGHMQRREINKSAYKEYLFGIAYFIKMVSPKLGRRFIKQLREIYWEY

SEQ ID NO: 2255 - protein, 336 aa, synthetic construct
  source 1..336: note = MG173-7 reverse transcriptase
MEYITSLQKALEQSNYDNEGKGKILQYAEKLLRNNLPVIFDKNHLAKLMGIELSTLTYYAVNTDSFYKKYKIPKKAGGFRKIHSPSYNLKLIQKWILNKILYKYEIHSAATGFVPNSSILNNALPHVNQRLVYNLDIKDFFPAIKISRVFYLFYNKGYTKELSYFFAKLLTYKESLPQGSPASPCIANIICTNMDFSLSKLSERVKANYTRYADDLTFSGDFNVNIVSKIIYKIINNNGFEIQEKKERVQFHYNMQEVTGLIVNDGVKVKRKLKKELDKHIYFSNKYGVFNHLQKIEMEDKSFFKEYLFGLAAYVKMIEEEKGKEYFKKLNDINWL

SEQ ID NO: 2256 - protein, 337 aa, synthetic construct
  source 1..337: note = MG173-9 reverse transcriptase
MSQFKEQVTLDVPVFNSIEELRESIGVKKIYFYKVLYCNDRLYKQISIPKRSGGIRILNVPPIALKEIQRWILDNILYKVQPEPCATGFMPNKSIISNAAPHLKKKYVLKMDIKDFFPSITFYEIRNIFFEFGYEKSIATALANICTYQNNLPQGAPTSPYLANLVCRNMDKRIFKLCQKHQISYTRYADDITVSGSSKIFWLKNVIEEIIVQYQFSLNNEKTVFLKPGDRKRITGIIVNEKLSVPRSVTRNLRKEIYFLKKFGLDEHLQKIDFEGTPEQYISHLYGVASYVKMVELNKGIFFINQLNSVFHKDNQHENDELLSISPPPIDWSIFDN

SEQ ID NO: 2257 - protein, 1121 aa, synthetic construct
  source 1..1121: note = MG140-196 reverse transcriptase ancestor
MLEHSPAAANRGASDGPVVLRYPFNTTNGPTTGEEPCGLAECPVCTAAFVDHKKLVKHLRRKHGATRQEIQWRCRKCHRTWPKIRSVASHHRHCKARTAPAPGAESQPATQCDEDGCGRSFSTTAGLQLHRRRAHPEAYNEPAPTGKRNAWSDEELRRLARAELDFPGGTSRHINQFLAERFPNRTVDQIRSIRGKTKRYREILEQVRQERTVESDEPEEPPSPPPDPDGSTALSQLKELLRELNSVDDSELARAVEYVRRALEGGDPNTGFDELLDKIFSPKKDPRPKRRPRQRPPPNNRKQRKRAEYKRLQRLFRKDRKRLVQQILDGMPAQATLPPVEDVEEVYRERFGRPSPPDSAPFEPTPCADPEAMLGPITVEEVRKALKSMKRNSAPGPDGHVTMKTLKSLPPPVLQLIFNCWLLMGRVPQALKECRTILIPKSADGLDDVNNWRPITIGSLLLRLYAKILAKRLRKAVNLHPRQKAFVPVDGCGENIAILSSVIRHARKRRKELNIVFLDLAKAFDTVSHESILRALRRFGVPEHFKDIIQDLYDGATTTIRTGDGETEPIPIRRGVKQGCPLSPLLFNMVMDELLRNIGSTEYGFELGDEKISVLAFADDIVLVSGSREGMERMLDICEEFFDARGLKLNARKSHSLSIVPAPKRKTMKVVDGPQWKVGNGSDGEPIPSIKADEVVKYLGVQFSPSGRPKVQLDKLKDWLQRIKKARLKPQQKIDMLRTYILPRLMYQLTLSEVNKSTLRRLDRKIRKTVKKFLHLPPGTPTDFFHLPTREGGLGLPELTETVPARRLKLITRMRSSEDPVVRAVAKQSHWQKRKERCMRWVRAVGTQSASEVKTLKRSLQKERLERFTNELSTQGRGHKSLANSPAKNPWLHNGKSGLSGSEYINACKLLSNTLPTRVNLHRGRPDANKRCRRCHKTAETQAHVLSSCPATKGAITKRHNRVCDLIAKALKKKGWTVLREPRFRVPNGERLRPDLVVIKDDKVYVVDVTVPYENSGEDQRYQRYREKVDKYEPLVPQIKRKFGAENVEVLAIVVGARGTWCQGNNETLKKLGLSKKAIRRNLSMTALRGTLKIWGVFNRTEGRYERANPGQRPDSGTPVP

SEQ ID NO: 2258 - protein, 1121 aa, synthetic construct
  source 1..1121: note = MG140-197 reverse transcriptase ancestor
MLEHSPAAASSGASDGPVVLRYPFNTTNGPTTGEEPCGLAECPACSAAFVDHKKLVKHLRRKHRATREEIQWRCRHCHRTWPKIRSVASHHRHCKVRTAPAPGAESQPAVQCDQDGCGRSFSTTAGLSLHRRRAHPAAYNEPAPTGKRNVWSDEELRKLARMELDLPGGTSARINQFLAERFPNRTVDQIRSIRGRTKRYREILEQLRQERTVESNEPEAPPSPPPDPDGSTALSQLKELLRELNSVDDAELAAAVEYVRRALESNDPNTGFDELLDKIFPPKEDPRPKRRPRQRPPPNNRKQRKRAEYKRLQRLFRKDRKRLVQQILDGMPATATLPPVEDVEEVYRERFGRPSPPDAEPFEPKPCADPEGMVSPITVEEVRKALKSMKRNSAPGPDGHVTMKRLRSLPLPVLQLIFNCWLLMGRVPQSLKECRTTLIPKSADGLDDVNNWRPITIGSLLLRLYAKILAKRLRKAVNLHPRQKAFMPVDGCGENIAILSSVIRQARKRRKELNIVFLDLAKAFDTVSHDSILRALNRFGVPEHFKDVIQDLYDGATTVIRTGEGDTKPIPIRRGVKQGCPLSPILFNMVMDELLRNLPSTEYGFELGDEKIAVLAFADDIVLVSGSREGMERMLDLCEEFFEARGLKLNARKSLSLSIVPAPKRKTMKVDTGPQWKVGNGSDGVPIPMIKADDVVKYLGVQFSPRGRQKVQLDKLKDWLERVKKARLKPQQKLVMLRTYILPRLMYRLTLSETNKTTLRRLDRKIRKTVKKFLHLPPGTPTDFFHLPTKEGGLGLPELAETVPARKLKLITRMRSSEDPVVRAVAEQPHWQKQKERCMRWLRVPAIQSPSEIKTLRRSLHKERLERFTNELATQGRGHKSLANNPAKNDWLHGGKSGLRASEFINACKLLSNTLPTRVNLHRGRPDADKRCRRCHKTAETQKHVLSSCPATKGAITARHNRVCDLIAKALKEKGWTVIREPRIRVPSGERLRPDLVVIKDDKVYVVDVQVPYENGGEDQRYERYREKVDKYEPLVPQIKRKFGAENAEVLAIVVGARGTWCQGNNETLKKLGLSRKAIKRNLSMTALRGTLKIWGVFNRTKGRYERANPGQRPSSGTPVP

SEQ ID NO: 2259 - protein, 1121 aa, synthetic construct
  source 1..1121: note = MG140-198 reverse transcriptase ancestor
MLEHSTAAASSGASTGPVVIRYPVNTTNGGTTGEQACGFAECPNCALAFVDHKSLVKHLRRAHRATREEIQYVCRHCHRQWPKIESVASHHRYCKRKTAVAPDADSRLPVQCEVDGCGRSFTTTAGLRLHKKRAHPAAYNAPMPTGKRNLWSEEELRMLARMELDNPGGTNARINQLLHSRHPNRTVDAIRSIRGRTKRYREILEQLRQEGTPESNDPEAAPSPPPEPDGSISESQLEELLKELSQLDDAELAAAVEYVRRALESNDPGSGFDDLLGKLFPPKEGPRRKRRPRQRPPPKNRKQRKRAEYRRLQRLWRKDRSRLAQVILDGMPATAKEPPIGDVEEVYTERFERPSPEDAEPFEPKPCEDPQGMVNFITVEEVRKNLKSMKRNSAPGLDSNITMKRLRSLPLPCLQLIFNCWLALGKVPQSLKECRTKLLPKSAEGLDDVNNWRPITIGSLLLRLYAKILAKRLQKKVHLHPRQKAFQPLDGCGENIAILSSIIRDARKRRKELNIVFLDIAKAFDTVSHHSIQRALNRFGVPRHFKNVIEDLYDGATTVIRTGEGDTKPIPIRSGVKQGCPLSPILFNMVMDELLRDLPSTEWGYELGDEKVAVLAFADDIVLVSGSRAGMSRMLDYAAGFFEARNLQLNARKSLGLSIVKAPKRKTMKIETGPLWSVGNGSDGVPIPMLSADDMVRYLGVQFSPRGRQKVDLSELKGWLERVKKSRLKPQQKLVMLRTYILPRVLYRLTIGEANKTTLRRVDREIRKTVKKFLHLPVGTATDFFHLSTKEGGLGLPPLAETVPKRKLKLATRLQSSEDPIIRAVAESPHWRKQTDRCLRWIRVPAINRPSDINRRARELHNDRLERFTNELATQGRCHRSLANNPLKNDWLHGHRSGLRASEFIDACKLLTSQLPTRAALHRGRPEADKRCRGCGKSAETQKHVLSSCPLTKQATTARHNRVADLIARYLKEKGWNVIREPRIRNPSGELMRPDLVVIKDDNVAVVDVQVPYEDGGHDQLAERYREKCKKYRPLTPTIRHVFGATNATIGAIVVGARGTWCQGNNPILNHLGVNRKAIKRNLSMTALRGTLKIWGAFKNTVGRYERAHPSQRPSSGPPVP

SEQ ID NO: 2260 - protein, 1121 aa, synthetic construct
  source 1..1121: note = MG140-199 reverse transcriptase ancestor
MDKGSAAAPSSGASDGPHVIRYPFNTTNGGTTGEEPCSLSECPNCGEAFVSHKSLVKHLRRAHGPTREEIQYRCRKCHREYPNLRSVASHHRHCKRKTATASEGSASLPTACEVPHCGRSFSTKAGLSLHRRRAHPEEYNEPTPTGKRRRWSDEELRMLARMELDLPGLSSRHINQLLAERFPNRTVEAIRSMRGRTPKYREILEELREEGAPEEDPSEAGSTAEPEPGGSISKPELRELLKELTTVDDAHVQAALEYTRRVLESDDVDEGFDDFIEQLFPPRKRRRPKRRPRERPPPNNRRQRRRAEYKRVQRLFRKDRKRLVNQILDGAPTTATLPPVEDVEEVYRDRFSTPSPPDSAPFTSKPCNDPSGLVGPITVEEVRKALKSMKRNSAPGPDGQITMKRLRSLPPKVLAAIFNVWLLMGRVPESLKECRTTLIPKSGDNLDDVNNWRPITIGSLLLRLYAKILARRLQKKVNLHPRQKAFMPVDGCGENIAILSSIIRHARKRRKELYIVFLDLAKAFDTVSHDSIQRALRRFGVPEHFVDVIQDLYDGATTVISCGDGDTKPIPIRRGVKQGCPLSPILFNMVMDELLSSLGDTEYGFELGDEKVSALAFADDIVLISDSRAGMSRLLDQCEEFFDARGLKLNAKKCASLSLAPAPKRKTMKIATEPIWRINNPSDGEPIPMIGPDDTVKYLGVQFSPSGKPKVQLDKLKDWLERIKKARLKPQQKLVMLRTYILPRLLYRLTLGEVNKNTLRRLDRLIRKTVKKFLHLPSGTPTSFFHLPVKDGGLGLPSLVETVPMAKLKLINRLQSSDDPVVRAVAESEHWRKELRRCRRWLGIPAVPRPSDINSAKKELHKERRERFTNWLTTQGRGHEQLANNPAKNDWLHGHNSSLRAREFINACKLLSNTLPTRVNLHRGRPDADKRCRRCGQTPETQKHVLQSCPATKRAITKRHNRVCDKIAKALREKGWTVIREPRIRTPSGELLKPDLVVVKDDRVYVVDVQVPYENSAHDYLAERYREKVDKYEPLTEQVKRRYGAKDAEVGAIVIGARGTWCPRNNKVLKKLGGLTKSIRRNLSMTALRGSLRIWRCFNGTRSRSRRTHPEKVPNRGPPAP

SEQ ID NO: 2261 - protein, 1121 aa, synthetic construct
  source 1..1121: note = MG140-200 reverse transcriptase ancestor
MTKGSAAAASSGASTGPHVIRYPFNTTNGGTTGEQPCFFAECPNCGEAFVDNKSLVKHLRRAHKATRDQIQYVCRHCHRQFPKLESVSSHHRYCKRKTATAPDGGAGLPVECEVDGCGRSFTTTAGLRLHRRRAHPTEYNAPIPTGKRRLWSEEELRMLARMELDNPGLSNARINQLLHSRHPNRTVDAIRSMRGRTPRYREIMEELREEGAPEDNPSEAGSTAEPEPEGSISECQLRELLKELSQLDDAQVQASIEYTRRVLESDDPGEGFDDFLEKLFPPKEGRRPKRRPRERPPPKNRKQRRRAEYRRLQRLWRKDRSRLAQVILDGMPTTAKEPPIGDVEEVYTDRFERPSPEDTAPFTSKPCDDPQGLVDFITVEEVRKNLKSMKRNSAPGLDSNITMKRLRSLPLPCLAAIFNVWLLLGRVPQSLKQCRTKLLPKSAEGLDDVNNWRPITIGSLLLRLYAKILARRLQKKVNLHPRQKAFQPVDGCGENIAILNSIIRDARKRRKELYIVFLDIAKAFDTVSHDSIQRALNRFGVPEHFRDVIEDLYDGATTVIQTGEGDTKPIPIRSGVKQGCPLSPILFNMVMDELLSSLGDTEWGYELGDEKVAALAFADDIVLVSGSRAGMSRLLDQAAGFFEARNLQLNAKKCLGLSLKPAPKRKTMKIETGPIWSVNNGSDGVPIPMLGPDDTVRYLGVQFSPSGKKKVDLAELKDWLERIKKSRLKPQQKLVMLRTYILPRVLYRLTIGEANKTTLRRVDRLIRKTVKKFLHLPVGTATSFFHLPVKDGGLGLPSLLETVPKAKLKLAYRLQSSDDPVIRAVAESDHWRKELRRCRRWLGIPAVDRPSDINKRKRELHKERRERFTNELTTQGRCHQQLANNPLRNDWLHGHNSSLRANEFIDACKLLTSQLPTRAALHRGRPEADKRCRGCGKSPETQKHVLQSCPLTKQARTARHNRVADLIAKYLKEKGWNVIREPRIRTPSGELLKPDLVVVKDDNVAVVDVQVPYEDSAHDQLAERYREKCDKYEPLTETIKHLFGAKNATIGAIVVGARGTWCPANNRILNHLGANTKAIKKNLSMTALRGSLKIWRAFKNTVSRSKRAHPSKVPSSGPPVP

SEQ ID NO: 2262 - protein, 1121 aa, synthetic construct
  source 1..1121: note = MG140-201 reverse transcriptase ancestor
MLEDSPAAANRGASDGPVVLLYPFNTTNGPTTGEEPCGLWECPVCSAAFASPKELVKHLRRKHGATKKEVTWRCSKCHRTWPNIRSVASHYRHCKARTAPAPPAESQPANQCDEDGCGRSFSTQAGLSLHRRRKHPEAYNEPAETGKRNAWTDEELRRLAKAELEFPGGSSRNINQQLAEHFPNRTVDQIRKIRGKTKRYREILQQARQERAVESEEEDEEPSPPPDPDGSTALSQLKKLLRELDSVDDSELARAVAYVRRTLEGGDPNEGFDELVDKIFSQKREPRPKRRRRRRPRPNNRKQRKRQKYKRVQRLFRKDRKRLVQQILDGTPAQATLPAVEDVEEVYRERFGTPSPPDSAPFEPTPGADDSAMLGPITVEEVREALKSMKRDSAPGPDGHVTMKTLKSLPPPVLALIFNVWLVSGRVPEALKECRTILIPKSGDGAEDVNNWRPITIGSLLLRLYAKILAKRLRKAVNLNPRQKAFVPVDGCFENIAILQSVIRHARKRRKELHIVFLDLAKAFDTVSHESILRALRRFGVPEHFVDIIQDLYDGATTTIRTGDGETEPIPIRRGVKQGCPLSPLLFNMVMDELLRKIEQSDHGFELGDEKISVLAFADDLVLLSDSREGMQRMLDICEEFFDARGLKVNAKKCHSLSIVPARKRKTMKVVDGPQWKVGNGSDGEPIPSVKADDVVKYLGVQISPSGRVKVQLDKLKDWLQRIKKAPLKPQQKIDMLRTYILPRLMYQLRLSEVNKSTLKRLDRLIRKTVKKFLHLPPGTPTSFLYMSTREGGLGLPELTETVPAARLKAITRMASSEDPVVRAVARQTHWQERTERCLRWVRAVGTQSATEVKTLKKSLQKRRLERFTNELPTQGKGLKSMANSPAKNSWLRNGKSGLSGREYVTACKMLSNTLPTRVNLHRGRPDANKRCRRCGKTAETQAHVLSGCPATKGAITKRHNRVCDMIAKELKKKGWTVLREPTFRVPNGERLRPDLVVIKDNKVYVVDVTVPYENSAEDQRHQRYREKVEKYEPLVPQIKKQFGAKNVEVLAIVVGARGTIAKGTNETLKKLGLSKKGIARSLSMTALRGSLKIWHVFNRTEGRPERANEGQRPDSGSPVP

SEQ ID NO: 2263 - protein, 1121 aa, synthetic construct
  source 1..1121: note = MG140-202 reverse transcriptase ancestor
MLEHSPAAANRGASDGPVVLLYPFNTTNGPTTGEEPCGLAECPVCSAAFVSPKKLVKHLRRKHGATRQEIQWRCRKCHRTWPNIRSVASHYRHCKARTAPAPGAESQPANQCDEDGCGRSFSTTAGLQLHRRRKHPEAYNEPAPTGKRNAWSDEELRRLARAELDFPGGSSRNINQQLAEHFPNRTVDQIRSIRGKTKRYREILQQVRQERAVESETPDEAPSPPPDPDGSTALSQLKKLLRELNSVDDSELARAVAYVRRTLEGGDPNSGFDELVDKIFSPKRDPRSKRRRRRRPPPNNRKQRKRQEYKRLQRLFRKDRKRLVQQILDGTPAQATLPPVEDVEEVYRERFGSPSPPDSAPFEPTPCADDEAMLGPITVEEVREALKSMKRDSAPGPDGHVTMKTLKSLPPPVLQLIFNVWLVLGRVPEALKECRTILIPKSGDGAEDVNNWRPITIGSLLLRLYAKILAKRLRKAVNLNPRQKAFVPVDGCGENIAILSSVIRHARKRRKELHIVFLDLAKAFDTVSHESILRALRRFGVPEHFVDIIQDLYDGATTTIRTGDGETEPIPIRRGVKQGCPLSPLLFNMVMDELLRNIGTTEHGFELGDEKISVLAFADDLVLLSGSREGMERMLDICEEFFDARGLKVNAKKSHSLSIVPAPKRKTMKVVDGPQWKVGNGSDGEPIPSIKADEVVKYLGVQFSPSGRPKVQLDKLKDWLQRIKKAPLKPQQKIDMLRTYILPRLMYQLRLSKVNKSTLKRLDRKIRKTVKKFLHLPPGTPTDFFYMPTREGGLGLPELTETVPAARLKLITRMRSSEDPVVRAVAKQSHWQEREERCLRWVRAVGTQSATEVKTLKKSLQKRRLERFTNELSTQGRGHKSMANSPAKNSWLRNGKSGLSGREYVTACKMLSNTLPTRVNLHRGRPDANKRCRRCHKTAETQAHVLSSCPATKGAITKRHNRVCDMIAKALKKKGWTVLREPRFRVPNGERLRPDLVVIKDDKVYVVDVTVPYENSAEDQRYQRYREKVDKYEPLVPQIKRKFGAENVEVLAIVVGARGTLCQGTNETLKKLGLSKKAIARSLSMTALRGSLKIWGVFNRTEGRYERANEGQRPDSGTPVP

SEQ ID NO: 2264 - protein, 1121 aa, synthetic construct
  source 1..1121: note = MG140-203 reverse transcriptase ancestor
MDEGSANAPSGSASDGPHVLTYPFNTTNGGTTGEEPCSVSKCPGCGEAFTSTKSLKKHLRKAHGPTREKIQYRCRKCNREYPNIRSVASHYRSCKGRTPSAGSGSASAPTACEVPHCGRSFSTKRGLSQHRRRAHPEEYNEPTPTGKRRRWSDEELRMLARMEADLPGKSTRHINQLLAERFPNRTVEAIRGQRNRTPKYRELLQELREEAAPAEDPSESGSPSDPEPGGSVPSPSLREALKELTEEDDVHVRSALEYTDKVLESDDVDEAFDDFIEQLYPPRRRRRPKRRPRKRPSPNNRRQRRRQQYARVQRLFRKNRKRLVKQILDGAPTSSTLPPVEDVEEVYRDRFSTPSPPDSAPFESKPSNDDSELLGPITAEEVKKALKSMKRNSAPGPDGEITMKTLKKLPPKVLAAIFNVWLLTGRVPESLKECRTVLIPKSGDPLDDVNNWRPITIGSLLLRLYAKILARRLSKAVNLNPRQKAFVPVDGCGENVAILDSIIRHARRRRKELYIVFLDLAKAFDTVSHDSIMRALRRFGVPEHFVDLIRDLYDGATTTISCGDGETEPIPIRRGVKQGCPLSPILFNMVMDELLSSIGDTEYGFKLGDERISALAFADDLVLISDSRAGMQRLLDQCEEFFDARGLKINAKKCASLSLKPAGKRKTMKVDTEPTFRINNPSTGEPIPAVGPDDTVKYLGVQFGPSGKPKAQVDKLKDWLERLKKARLKPQQKIHILRTYIIPRLMYQLTLGKVNKNTLKRLDRLIRKAVKKWLHLPSSTPTSFFHLPVRDGGLGIPSLRETVPVARLRLLTRLASSDDPVVRAVAKSEHWRKELRRCSRALGIGGTPEASDINSLKKELRKQRRERFTNWLTTQGRGHEQFANSPASNSWLHNGTSTLSGREFINAIKLLSNTLPTRVTLSRGRPDADKRCRRCGQTPETLSHILQSCPATKGMRTKRHNRVCDKIAKKLRKKGWTVIREPRIRTPNGELLKPDLVVVKDDRVFVVDVTVPYENSAHDYLEERYREKVDKYEPLTEQVKKRYGAKDVEVLGIVIGARGAWCPANNKVLKKLGGLSKSTRRTLSMTALRGSLRIWRCFNQTRSRSRRGRPGGVPNRGAGAP

SEQ ID NO: 2265 - protein, 1121 aa, synthetic construct
  source 1..1121: note = MG140-204 reverse transcriptase ancestor
MDKGSASAPSGSASDGPHVLTYPFNTTNGGTTGEEPCSLSKCPGCGEAFTSTKSLVKHLRRAHGPTREEIQYRCRKCHREYPNIRSVASHYRHCKGRTASAGSGSASAPTACEVPHCGRSFSTKAGLSLHRRRAHPEEYNEPTPTGKRRRWSDEELRMLARMELDLPGKSSRHINQLLAERFPNRTIEAIRSMRNRTPKYRELLQELREEAAPEEDPSEAGSTSDPEPGGSIPSPELREALKELTEEDDVHVRSALEYTEKVLESDDVDEAFDDFIEQLFPPRRRRRPKRRPRKRPPPNNRRQRRRQQYKRVQRLFRKDRKRLVKQILDGAPTSSTLPPVEDVEEVYRDRFSTPSPPDSAPFTSKPSNDDSALLGPITVEEVKKALKSMKRNSAPGPDGEITMKTLKSLPPKVLAAIFNVWLLMGRVPESLKECRTVLIPKSGDPLDDVNNWRPITIGSLLLRLYAKILARRLSKAVNLNPRQKAFVPVDGCGENVAILDSIIRHARKRRKELYIVFLDLAKAFDTVSHDSIMRALRRFGVPEHFVDIIRDLYDGATTTISCGDGETEPIPIRRGVKQGCPLSPILFNMVMDELLSSIGDTEYGFELGDERISALAFADDLVLISDSRAGMERLLDQCEEFFDARGLKLNAKKCASLSLAPAPKRKTMKVATEPTFRINNPSTGEPIPAVGPDDTVKYLGVQFSPSGKPKVQVDKLKDWLERLKKARLKPQQKIHMLRTYIIPRLMYQLTLGKVNKNTLKRLDRLIRKTVKKFLHLPPGTPTSFFHLPVKDGGLGLPSLRETVPVARLKLITRLASSDDPVVRAVAKSDHWRKELRRCRRALGIGGTPRASDINSLKKELQKQRRERFTNWLTTQGRGHEQFANSPAKNSWLHNGNSTLSGREFINACKLLSNTLPTRVNLHRGRPDADKRCRRCGQTPETQAHVLQSCPATKGAITKRHNRVCDKIAKALRKKGWTVIREPRIRTPNGELLKPDLVVVKDDRVYVVDVTVPYENSAHDYLEERYREKVDKYEPLTEQVKKRYGAKDVEVLGIVIGARGTWCPRNNKVLKKLGGLSKSTRRTLSMTALRGSLRIWRCFNGTRSRSRRGRPGKVPNRGASAP

SEQ ID NO: 2266 - protein, 1036 aa, synthetic construct
  source 1..1036: note = MG140-205 reverse transcriptase ancestor
MSGLCSASDLTVGTKNASANHCKWEDAAPTAPASESSGEFTCPDCGRAFKSQRGLSLHRRRKHPEVYHAENQPKARTKARWDHEELVLLAREEIRLQGCGGPRNINQELAKRFPNRTLEAIKGLRNKKPRYKELLAELRSESADQPVPSGSPSEGSDASEGVDHDWREKLREAIDASGFDSLDLDLLAPGCPSEEVREKIDEEFEEWVKSLTCRHRPPPRPRRGRNGVPRPPRPTNKRARRRAQYARVQRLYKKNRSRCAQSVLSGSWECDKPAPDLPLEEMEPFWRPIFETPSVPDSRSPEPVGPVQWDLVEPITPDELEKVLKGMKDGAPGPDGIKLKDLKKLDAEELAAHFNLWLLAGYQPTALCQGVTVLIPKDPGTTDPAKHRPITISSIIVRCFHKIMARRMEKHLPLSPRQKAFRAGDGIAENVWTLQAIIQHAKRKCKPLNVVFLDVRKAFDSVSHESILLAAKRMGVPPPLLSYIRELYSRSTTRLRVGGERSDPIRVRRGVKQGDPLSPHLFNAVIDWALSSLDPNIGISLGDVRINHLAFADDIALLASTPAGLQSQIDRLEEHLAKCGLTISAGPTGKSASLRIAVDGKAKRWVVNPNPFLRVGGEVIPALSISETYKYLGIQISARGKKCRANVAEKLQKGLDNLTRAPLKPQQRLYILRNHLLPSLYHQLVLSPCSKGYLNWLDRTVRAAVRSWLKLPKDTPTAFIHAEVADGGLGIPSLRHTIPLMRTKRLERLASSNDPVVAAVAKTPFFRKELRSWSRPTLGGRPITDKESLKQALAAALHRSVDGRGLRHSSQVPHAHKWVSSPTNLMSGRNYIGAIKVRGGLMHTAVRAARGRPERDVRCDCCGRPESLGHILQVCPRTSGARIKRHDRIVQLVAKAARRKGWTVLVEPAIVPTPAGIRKPDLVVWKDGSAYVIDVTVVSDNADLDKAHHRKVEYYNTPEIRDWVRNRTGAGEVKFSAVALNWRGVLSPQSADLLKNSLGLSKYDLSLLSVVVCEKGYRIWRHFKRSTYRVRRRNRG

SEQ ID NO: 2267 - protein, 1035 aa, synthetic construct
  source 1..1035: note = MG140-206 reverse transcriptase ancestor
MFACSECDGTFGNKGALGNHCKWKHAQTRLPERRAGGEFACPDCDNAYDSSGGLNVHRRAKHPDVYHAARQPAARVKARWSYEEMVLVARAELEIRGTNPPRGVVRVLHSRFPDRTFEAIKCLRNKNPRYKEVLAALEAEGVDEGPPTVTPSEQTHASAQADGLWRDQLRMAIDIGHVGVDDLDWVADGCPAEDIRNKLDELFASWVGHLVRGERAPARSHQPAAGVRNPGRELDPRRRRRAQYSAIQHLYGRKPSAAAHKVLDGSWECDDPVPTPTLEEFRMAWQPIFETPSIKDNRRPTCVGQVRWEIVSPVTPDELNKVLTEGASSAPGPDGVKLKDVIGLGTGELCSHFNLWLLCGSQPSALCVGRTIYIPKGSESNDALKYRPITIASHILRVFHKIMARRFDAFLPLKYTQKGFRSGDGIAQHVLSLQAIIDGAKRRCKPVNLVFLDVRKAFDSVSHDTIVLAMRRLGCPDPFLSYIRDLYSRSSTVIEHNGERSAPIFTRRGVKQGDPLSPFMFNAVIDWAFSSLDDHIGFSFGHVRVNNLGYADDVALLSDTQAGLRSQLGQFESHLAKGGLTISAGTEGKSASLSIAVDGKAKRWVVDQTPFLATNADIIPALSASGEYRYLGIMLGSGGAKVRSSLREELLQGLRNITRAPLKPHQRLRILRNFLLPKYLHELVLAPVADGWLNWLDTAIRANVRQWLKLPQDTPVAFIHAGTGDGGLSVPSLRYSVPVMRRKRLEAVHSATDPISTALAASPFFQKELSGLSRKTLGGRLVTDKQSLAQAWAACLHTKVDGRGLSEARSCTEGSRWVSNPPRNQSGANYIGAIKARGGLLCSKVRSARGDSGRDVRCDSCMRPETAQHIIQVCPRTSGPRMRRHDRVVQFVSAAAERAGYKVLVEPRIVGRTLGVRKPDLVLWNESKAYVADVTVTSDQVGGVKAHRDKVAYYDQPEIREWVEKYTGRSDISFSAVAANWRGVLSPLSADFLKSVLKLSNWDISLLGLRICEETYHIHRYFGRSTYRIRGRGAS

SEQ ID NO: 2268 - protein, 1036 aa, synthetic construct
  source 1..1036: note = MG140-207 reverse transcriptase ancestor
MSGLCSASNLTVGTKNASANHCKGEDAAPTAPASESSGEFTCPDCGRAFKSQRGLSLHRRRAHPEVYHAENQPRARTKARWDHEELVLLAREEIRLQGCGGPRNINQELAKRFPNRTLEAIKGMRNKKPRYKELLAELRSESGDQPVPSGPPSPGSDASEGVDHDWREKLREAIDGSGFDSLDLDLLEPGCPSEEVREKIDEEFEEWVKSLTCRHRPPPRPRRGRNPRPRPPRPTNKRARRRAQYARVQRLYKKNRSRCAQSVLSGSWECGKEAPDLPLEEMEPFWRPIFETPSVPDSRSPEPVGPTQWDLVEPITPDEVERVLKGMKDGAPGPDGIKLKDLKKLDAEELAAHFNLWLLAGYQPSALCQGVTVLIPKDPGTTDPAKHRPITISSIVVRCFHKILARRMEKHLPLSPRQKAFRAGDGIAENVWTLQAILQHAKRKLKPLCVAFLDVRKAFDSVSHESILLAAKRMGVPPPLLSYIRELYSRSTTRLRVGGELSDPIRVNRGVRQGDPLSPHLFNAVIDWALSSLDPNIGISLGDVRINHLAFADDIVLLASTPAGLQSQVDRLEEHLAKCGLSISAGPNGKSATLRIAVDGKAKRWVVNPNPFLRVGGEVIPALSISETYKYLGINISARGKKCRANVAEKLERGLSNLTRAPLKPQQRLYILRTHLLPSLYHQLVLSPCSKGYLKWLDRTVRAAVRSWLKLPKDTPTAFFHAEVADGGLGIPSLRHTIPLMRTKRLDRLASSSDPVIAAVLKTPSFRKEMRSWSRPTLGGRPITDKESLKQALASALHRSVDGRGLRHSSEVPHAHKWVSSGTNLMSGRNYIGAIKIRGGLMHTAVRAARGRPERDVRCDCCGRPESLGHILQVCPRTHGARIKRHDRIVQLVAKAARRKGWTVLVEPAIVPTPAGIRKPDLVVYKDGSAYVIDVTVVADNADLDEAHHRKVDYYNTPEIRDWVRNRTGAGEVKFSAVALNWRGVLSPRSARLLKNSLGLSKSDLSLLSVVVCEKGYRIWRHFKRSTYRVRRRNRG

SEQ ID NO: 2269 - protein, 1036 aa, synthetic construct
  source 1..1036: note = MG140-208 reverse transcriptase ancestor
MSGLCSASGFTVGTKNASANHCKGEDAAPTAPASGSSGEFTCPDCGRAFKSQRGLSLHRRRAHPEEYHAENQPRARTKARWDHEELVLLAREEIRLQGCGGRRNINQELAKCFPNRTLEAIKGMRNKKPRYKELLAELRSESGSQPTPSGPPSPGSDASEGVDHDWREKLREALQGSGFDSLDLDDLVPGCPSEEVRELIDEEYEEWVKSLASRHRPPPRPRRGRNPRPRPPRPTNKRARRRAQYARVQRLYKKNRSRCAKSVLSGDWECGKEAPDLPLEEMEPFWRPIFETPSVPDSRSPEPVGPTQWDLVEPITADEVERALKGMKDGAPGPDGIKLKDLKKIPAEELAAHFNLWLLAGYQPSALRQGVTVLIPKTPGTTDPAKHRPITISSIVVRCFHRILARRMEKHLPFSPRQKAFRAGDGIAENVWTLQAILQHAKRKLKPLCVAFLDVRKAFDSVSHESILLAAKRMGVPPPLLSYIRELYSNSTTRLRVGGELSDPIRVNRGVRQGDPLSPHLFNAVIDWALSSLDPNIGISLGDARINHLAFADDIVLLASTPAGLQSQVDRLEEHLGKCGLSISAGPNGKSATLRIAVDGKAKRWVVNPNPFLRVGGELIPALSISETYKYLGINISARGKKTRANVAEKLERGLSHLSRAPLKPQQRLYILRTHLLPSLYHQLVLSPCTKGYLKWLDRTVRAAVRSWLKLPKDTPTAFFHAEVADGGLGIPSLRHTIPLMRTKRLDRLASSSDPVIAAVLKTPSFRKEMRKWSRPTLGGRPITDKESLKQALASALHRSVDGRGLRHSSEVPYAHRWVSSGTNLMSGRNYIGAIQIRGGLLHTAVRAARGRPDADVRCDCCGRPESLGHILQVCPRTHGARIKRHDRIVELLAKAARRKGWTVLVEPAIVPTPAGIRKPDLVVYKDGSAFVIDVTVVADNADLDEAHHRKVDYYNQPEIRDWVRNRTGAGEVKFSAVALNWRGVLSPQSARLLKKSLGLSKSDLSLLSVVVCEQGYRIWRHFKRSTYRVRRRNRG

SEQ ID NO: 2270 - protein, 1036 aa, synthetic construct
  source 1..1036: note = MG140-209 reverse transcriptase ancestor
MAGLCSASGTTVGTKNGSANHCRCEDASATAPASGSSSEFTCPDCGRSFKSQRGLSQHRRRAHPEEYHSEQTPKARTKARWDHEEMYLLAREEVRLQGCGSRRNINQELAKRFPNRTLEAIKGQRNRKPRYKELLQELREQAADQGASGGEPSAGSDSSPAADHDWRESLREALTGASFSSLDLDDIVPGCPSEEVRELIDEEFEEWVEQLYSRHRRPPRKRRGRRPRPRPPRPTNKRQRRRAQYARVQRLYKKNRSRCARTVLSGNWKLGKESPSLPLEEMEPFWRPLFETPSVPDSRSPEPVGPVQWDLVEPITADEVKRALKGMKDGAPGPDGITLKDLKKIPPEELAAHFNLWLLAGYQPSALRQGVTVLIPKVAGTSDPAKYRPITISSIIVRLFHRILARRMERHLPLSPRQKAFRKGDGIAENVFLLQAILQHAKRRLRPLCVAFLDVRKAFDSVSHESILLAAKRMGVPPPLLDYIRNLYSNSTTRLRVGGELSDPIRVNRGVRQGDPLSPHLFNAVIDWALSSLDPNIGVSLGDERINHLAFADDLVLLASTPAGLQRQVDQLEEALGKCGLEINAGPNGKSATLRIKVDGKRKRWVVDPNPFLRVGGELIPALSVSETYKYLGIQISARGRVTRANVAEKLQKGLDNLTRAPLKPQQRLYILRNHLIPSLYHQLVLSRVSKGYLKRLDRTIRAAVRSWLKLPKDTPTAFFHADVADGGLGIPSLRHTIPLMRTKRLERLASSSDPVIRAVAKTPSFRKEMRRWSRPTVGGTPISSKEDLKQALADQLHKSVDGRGLRHASQVPSAHRWVTDGTSLMSGRNYIGAIKVRGGLLHTRARASRGRPDADVRCDCCGRPESLGHILQTCPRTHGARIKRHDRVVELLAKKLRRKGWTVLVEPAIVPTPAGIRKPDLVVWKDGRAFVIDVTVVSDNADLDEAHQRKVDYYNTPEIRDWVRNRTGASEVKFSAVVLNWRGVLSPQSARLLKRSLGLSKSNLSLLSVVVLEQGYRIWRHFKRSTYRVRRRRRG

SEQ ID NO: 2271 - protein, 1036 aa, synthetic construct
  source 1..1036: note = MG140-210 reverse transcriptase ancestor
MAGLCSASGTTVGTKNGSANHCKCEDASATAPASGSSSEFTCPDCGRAFKSQRGLSLHRRRAHPEEYHAENQPKARTKARWDHEEMYLLAREEIRLQGCGSRRNINQELAKRFPNRTLEAIKGQRNKKPRYKELLQELREQASDQGTSGGEPSAGSDSSPAADHDWRSNLREALQGSSFSSLDLDDIVPGCPSEEVRELIDEEFEEWVEQLYSRHRPPPRKRRGRNPRPRPPRPTNKRARRRAQYARVQRLYKKNRSRCAKTVLSGNWKLGKEAPSLPLEEMEPFWRPIFETPSVPDSRSPEPVGPVQWDLVEPITADEVKRALKGMKDGAPGPDGIKLKDLKKIPAEELAAHFNLWLLAGYQPSALRQGVTVLIPKVAGTSDPAKHRPITISSIIVRCFHRILARRMEKHLPLSPRQKAFRAGDGIAENVFLLQAILQHAKRRLKPLNVAFLDVRKAFDSVSHESILLAAKRMGVPPPLLDYIRELYSNSTTRLRVGGELSDPIRVNRGVRQGDPLSPHLFNAVIDWALSSLDPNIGVSLGDARINHLAFADDLVLLASTPAGLQSQVDQLEEHLGKCGLEISAGPNGKSATLRIKVDGKAKRWVVNPNPFLRVGGEVIPALSVSETYKYLGIQISARGRKTRANVAEKLQKGLDNLTRAPLKPQQRLYILRNHLIPSLYHQLVLSPCSKGYLKWLDRTIRAAVRSWLKLPKDTPTAFFHAEVADGGLGIPSLRHTIPLMRTKRLERLASSSDPVIAAVAKTPSFRKEMRRWSRPTVGGVPISSKENLKQALADQLHKSVDGRGLRHASQVPSAHRWVSDGTSLMSGRNYIGAIKVRGGLLHTAARASRGRPDADVRCDCCGRPESLGHILQVCPRTHGARIKRHDRVVELLAKAARRKGWTVLVEPAIVPTPAGIRKPDLVVWKDGRAFVIDVTVVSDNADLDEAHQRKVDYYNTPEIRDWVRNRTGAGEVKFSAVALNWRGVLSPQSARLLKRSLGLSKSNLSLLSVVVLERGYRIWRHFKRSTYRVRRRRRG

SEQ ID NO: 2272 - protein, 1036 aa, synthetic construct
  source 1..1036: note = MG140-211 reverse transcriptase ancestor
MAGLCSASDTTVGTKNASANHCKCEDASATAPASSSSSEFTCPDCGRAFKSQRGLSLHRRRAHPEVYHAENQPKARTKARWDHEEMYLLAREEIRLQGAGSPRNINQELAKRFPNRTLEAIKGQRNKKPRYKELLQELRDEAADQGVSGGEPSAGSDSSPAADHDWRSKLREAIDASSFSSLDLDLIVPGCPSEEVREQIDEEFEEWVEQLVARHRPPPRKRRGRNGRPRPPRPTNKRARRRAQYARVQRLYKKNRSRCAKTVLSGSWELGKEAPSLPLEEMEPFWRPIFETPSVPDSRSPEPVGPVQWDLVEPITADEVKRVLKGMKDGAPGPDGIKLKDLKKLDAEELAAHFNLWLLAGYQPSALCQGVTVLIPKDAGTTDPAKHRPITISSIIVRCFHKILARRMEKHLPLSPRQKAFRAGDGIAENVFLLQAILQHAKRRLKPLNVAFLDVRKAFDSVSHESILLAAKRMGVPPPLLDYIRELYSRSTTRLRVGGELSDPIRVNRGVRQGDPLSPHLFNAVIDWALSSLDPNIGISLGDVRINHLAFADDIVLLASTPAGLQSQVDQLEEHLGKCGLEISAGPTGKSATLRIKVDGKAKRWVVNPNPFLRVGGEVIPALSVSETYKYLGIQISARGRKTRANVAEKLQKGLDNLTRAPLKPQQRLYILRNHLIPSLYHQLVLSPCSKGYLKWLDRTIRAAVRSWLKLPKDTPTAFFHAEVADGGLGIPSLRHTIPLMRTKRLERLASSSDPVIAAVAKTPSFRKEMRSWSRPTLGGVPISSKENLKQALADQLHKSVDGRGLRHASQVPSAHRWVSSGTNLMSGRNYIGAIKVRGGLLPTAARASRGRPDADVRCDCCGRPESLGHILQVCPRTHGARIKRHDRVVELVAKAARRKGWTVLVEPAIVPTPAGIRKPDLVVWKDGRAYVIDVTVVSDNADLDEAHQRKVDYYNTPEIRDWVRNRTGAAEVKFSAVALNWRGVLSPQSARLLKNSLGLSKSDLSLLSVVVLEKGYHIWRHFKRSTYRVRRRRRG

SEQ ID NO: 2273 - protein, 1036 aa, synthetic construct
  source 1..1036: note = MG140-212 reverse transcriptase ancestor
MAGLCSASDTTIGTKNASANHCKCEDASDTAPASESSSEFTCPDCDRAFKSQRGLSLHRRRKHPEVYHAENQPKARTKARWDHEEMVLLAREEIRLQGSGSPRNINQELAKRFPNRTLEAIKGLRNKKPRYKELLQELRDEAADQGVSGGEPSEGSDASPAADHDWRSKLREAIDASSFSSLDLDLIAPGCPSEEVREKIDEEFEEWVEQLVARHRPPPRKRRGRAGVPRPGRPTNKRARRRAQYARVQRLYKKNRSRCAQTVLSGSWELGKPAPSLPLEEMEPFWRPIFETPSVPDSRSPEPVGPVQWDLVEPITADELKRVLKGMKDGAPGPDGIKLKDLKKLDAEELAAHFNLWLLAGYQPSALCQGRTVLIPKDAGSTDPAKHRPITISSIIVRCFHKIMARRMEKHLPLSPRQKAFRAGDGIAENVLLLQAIIKHAKRQCKPLNVVFLDVRKAFDSVSHESILLAAKRMGVPPPLLDYIRELYSRSTTRLRVGGERSEPIRVRRGVKQGDPLSPHLFNAVIDWALSSLDPNIGISLGDVRINHLAFADDIALLASTPAGLQSQIDQLEEHLGKCGLSISAGPTGKSATLRIEVDGKAKRWVVNPNPFLRVGGEVIPALSVSETYKYLGIQISARGRKTRANVAEKLQKGLDNLTRAPLKPQQRLYILRNHLIPSLYHQLVLSPCSKGYLNWLDRTIRAAVRSWLKLPKDTPTAFIHAEVADGGLGIPSLRHTIPLMRTKRLERLASSSDPVIAAVAKTPFFRKEMRSWSRPTLGGVPISSKENLKQALADQLHRSVDGRGLRHASQVPAAHRWVSSPTNLMSGRNYIGAIKVRGGLLPTAARAARGRPDRDVRCDCCGRPESLGHILQVCPRTSGARIKRHDRVVQLVAKAARRKGWTVLVEPAIVPTPAGIRKPDLVVWKDGRAYVIDVTVVSDNADLDKAHRRKVDYYNTPEIRDWVRNRTGAAEVKFSAVALNWRGVLSPQSARLLKNSLGLSKYDLSLLSVVVLEKGYHIWRHFKRSTYRVRRRNRG

SEQ ID NO: 2274 - protein, 1035 aa, synthetic construct
  source 1..1035: note = MG140-213 reverse transcriptase ancestor
MFACGQCDRTFGNKGALGNHCKWKHAQTRLPERTNGGEFACPDCDNAYDSSGGLNVHRRAKHPDVYHAARQPAARVKARWSYEEMVLVARAELEIRGTNPPRGVVRVLHSRFPDRTFEAIKCLRNKNPRYKEVLAALEAEGVDEGLPTVTPSEQTHASAQADGLWRDQLRMAIDIGHLGVDDLDWVADGCPAEDIRKKLDELFASWVGHLVRGERAPARSHQPAAGVRNPGRELDPRRRRRAQYSAIQHLYGRKPSAAAHKVLDGSWECGDPVPTPTLEEFRMAWQPIFETPSIKDNRRPTCVGQVRWEIVSPVTPDELEKVLTEGASSAPGPDGVKLKDVIGLGTGELCSHFNLWLLCGSQPSALCVGRTIYIPKGSESNDALKYRPITIASHILRVFHKIMARRFDAFLPLKYTQKGFRSGDGIAQHVLSLQAIIDGAKRRCKPVNLVFLDVRKAFDSVSHDTIVLAMRRLGCPDPFLSYIRDLYSRSSTVIEHNGERSAPIFTRRGVKQGDPLSPFMFNAVIDWAFSSLDDHIGFSFGHVRVNNLGYADDVALLSDTQAGLRSQLGQFESHLAKGGLTISAGTEGKSASLSIAVDGKAKRWVVDQTPFLATNADIIPALSASGEYRYLGIMLGSGGAKVRSSLREELLQGLQNITRAPLKPHQRLRILRNFLLPKYLHELVLAPVADGWLNWLDTAIRANVRQWLKLPQDTPVAFIHAGTGDGGLSVPSLRYSVPVMRRKRLEAVHSATDPISTALAASPFFQKELSGLSRKTLGGRLVTDKQSLAQAWAGCLHTKVDGRGLSEARSCAEGSRWVSNPPRNQSGANYIGAIKARGGLLCSKVRSARGDSGRDVRCDSCMRPETAQHIIQVCPRTSGPRMRRHDRVVQFVSAAAERAGYKVLVEPRIVGRTLGVRKPDLVLWNESRAYVADVTVTSDQVGGVKAHRDKVAYYDQPEIREWVEKYTGRSDISFSAVAANWRGVLSPLSADFLKSVLKLSNWDISLLGLRICEETYHIHRYFGRSTYRVRGRGAS

SEQ ID NO: 2275 - protein, 1057 aa, synthetic construct
  source 1..1057: note = MG140-214 reverse transcriptase ancestor
MNGPTTGEEPAECPACTAAFVDPKKLVKHLRRKHGGQDIQWRCRKCHRTWPNIRSVASHYRHCKARPPTPAPGAESQPCDECGRSFSTTAGLQLHRRRKHPEAYNESLPQPTGKRNAWSDEELRRLAKAELDFGSSRNINQQLAEHFPHRTVDQIRSIRKTKRYREILQQVRQERTGESETPDEAPSPDPDGSTALSQLKKLLRELNSADDSELARAVAEYVRRTLEGGDPDSGFDELVDKIFSPKRDPKSKSRRRKRPPFEPNNRNQRKRQRYKRVQRLFRKDRKRLVQQILDGTPAQTTLPDVEDVEEVYRERFGSPSPPDDAPFTPGADDEAALGPITVEEVREALKSMKRDSAPGPDGNVTMKTLLSLPPPVLQLIFNVWLVLGRVPEALKECRTILIPKSGDAEDVNNWRPITIGSLLLRLYAKLLAKRLRKAVNLNPRQKAFVPVDGCGENIAILSSVIRHARKRRKELHIVFLDLAKAFDTVSHHSILRALRRFGVPEHFVDIVQDLYDGATTTIRTGDGETEPIPMRRGVKQGCPLSPILFNMVMDELLRNIGTEHGFELGDEKISVLAFADDLVLLSGSRDGMERMLEVCEEFFDARSMKVNARKSHSLSIVPAPKRKTMKVVEGPQWKVGGEPIPSVKATEVVKYLGVQFSPAGRPKVKLDKLKDWLQRIKKAPLKPQQKIDMLRSYILPRLMHQLRLSKVNAKTLRRLDRKIRKTVKKILHLPPGTPTDFFYMPTREGGLGLPELTETVPAARLKLITSMRSSEDPVVRAVAKQSHWLERERWVRALGTQSATELKTLKRRLERFTNSTTGRGHKSMANSPAKNSWLRNGRGLSGREYVTACHMLSNTLPTRVNLHRGRPDANKTCRRCHKTAETQAHVLNGCPATKGAMTKRHNRVCDMIARALKKKGSTVLREPRFRVPNGRLRPDLVVIKGDKVYVVDVTVPYDNSAEYLDQRYQEKVDKYGPLVPQIKKKFGAERVEVLAIVVGARGLLCQGTNETLKKLGLSKKQARSLSMTALRGSMKIWGVFGNRSEGRFERAPDTGTP

SEQ ID NO: 2276 - protein, 1056 aa, synthetic construct
  source 1..1056: note = MG140-215 reverse transcriptase ancestor
MYPTTGEDPQECPVCNSSMIDPKQIVDHFRRKHHGLSMQWKCRKCERDWPNIRSVASHYRHCTGRPPSLASPAKSHKCDECGRAFSSLAGLQLHRKRKHPEAYNESLPRPTGKNRPWGDDELRRLASAELDFGTSKHINQRLHDHFPHRTVEAIATIRKSKRYRCILKKVVEDRSGESETQEEARASDPDDSIVLEQLRKRIAELESGDSSPTVRAVLAYTRKSLADGDADSGLDLLPSEIYSPKPTPPSKSRRRKRAPFEPQNRSQRRRQHYKQVQNLYKRNRKQAAGVILDGSPVQTVFPDVEKVDEVFRGRFSRPSPPDDAEFTVCPGDEMNMGYITAEEIQQARSSMKKDNAPGPDRNVTMDTVLSLELPVLELLFNTWFALGQVPAAFKEARTILLPKSGDASDPNNWRPITICSLIGRLYAKLLANRLSKCANLSERQKAFVPVDGCGENTAILSAVIAHAHKARRQLHIAFLDLAKAFDTVPHTSIIRALRRKALPEHFIDIVENLYTDATTSISTGDKSTESIPMRSGVKQGCPLSPILFNLVLDELIRNIGTNNGISLGDSKIAILAFADDLVLLSGSKDGMESNLKVCEEFFDARSMKINARKSMSLSIVRAHKRKTMMTDEGPQWKVGGEFLPAIKHTEEIKYLGVQYTAAGRSVAKFPKLDEWLQRLKKAPLKPQQRIDMVRSTITSRLIHTLRLCRVHAKLLKNLDRKIRTFVKGVLHLPPGTSTDFFYIPIRKGGLGLQEFMSLIPAAKLKLINSMKKSSDPVVVEAVRQEHWLREERWCRRVTSLTGNKDEALRRRVERYISSHTGQTQVGFANLPGQSRWLEGGRGLSGREYIVGCHMMSNTLPVRTRTFHGGPDRVTTCRYCHGVPETPSHALQSCPKVRDAVTKRHNTILTMLQRFLTPNHDSVIREPWFRGPEGRMNPDLVVKQGRMVYVVDLTVPYDSSIEFMDSQAQRKVDKYEVLVPLIKEKFQAERVEVLGLAVGARGLLTQAGVDVCQKLGLSHRQRRCLSMTALKQTCAIWGLFQSRPQGTFNKVPDTGTS

SEQ ID NO: 2277 - protein, 1056 aa, synthetic construct
  source 1..1056: note = MG140-216 reverse transcriptase ancestor
MYPTTGEDPQECPVCNSSMIDPKQIVDHFRRKHHGMSMQWKCRKCERDWPNIRSVASHYRHCTGRPPSLASPAKSHKCDECGRAFSSLAGLQLHRKRKHPEAYNESLPRPTGKNRPWGDDELKRLAAVELDFGTSKHINLKCHDHFPHRTVEAIATIRKSKRYRDILKEVVESRSLEQETREEAQASDPDSSIVLEQLRTRIAELESGDSSPSVRAVLAYTRRSLADGNASSGLDLLPSEIYSPKPTPASTSNRRKRTPFAPQNRSQRRRQHYKQVQSLYKRNRKQAAGVILDGSPIQTVFPDVEKVDEVFRGRFSRPSPPDDAEFTLCPGDTMNMGYITAEEIQQCRSSMKKNNAPGPDRNVTMDVVLALELPVLELLFNTWFALGQVPAAFKEARTILLPKSGDASDPNNWRPITICSLIGRLYAKLLASRLSKCANLSERQKAFVPVDGCGENTAILSAVIAHAHKTKSQLHIAFLDLAKAFDTVPHTSIIRALRRKALPEHFIDIVENLYTDATTSISVGDKSTPSIPMTSGVKQGCPLSPILFNLVLDELIQNIGTNNGISLGDSKIAILAFADDLVLLSGTTDGMESNLKVCEEFFDARSMKLNARKSMSLSIVRAHKRKTMLTDEGPQWKVHGEFLPAIKHTEEIKYLGVRYTAAGRSIAKFPKLDEWLQRLKKAPLKPQQRIQMVRSTITSRLIHTLRLCRVHAKLLKNLDRKIRTFVKGVLHLPSGTSTDFFYIPIRKGGLGLQEFMSLIPAAKLKLINSMKKSSDPVVVEAIRQEHWLREERWCRKVTSLQGNKDEAERRRVERYISSHTGQTQVGFANLPGQCRWLEGGGKLTGREYIVGCHMMSNTLPVRTRTFHGGPDRVTTCRYCPGVPETPSHALQSCPKVRDAVTKRHNTILTKLQHFLTPNYDSVIREPWFNGPEGRMNPDLVLKQGRMVYVVDLTVPYDSSIEFMDSQAQRKVDKYEVLEPLLRQKFQAERVEVLGLAVGARGLYTQTGVDVCQKLGLSDRQRRCLSMMALKQTCAIWGLFRSQPQGTFNKVPDTGTS

SEQ ID NO: 2278 - protein, 1057 aa, synthetic construct
  source 1..1057: note = MG140-217 reverse transcriptase ancestor
MTYPTTGEEPSKCPACGEAFTSTKSLVKHLRRAHGGEEIQYRCRKCHREYPNIRSVASHYRHCKGRRPSPEPASKEFPCPHCGRSFSTKAGLSLHRRRAHPEEYNESLPTPTGKRRRWSDEELRMLARMELDLPGSRHINQLLAERFPNRTIEAIRSIRRKPKYRELLQELRETPSADEDPSEAGSTSDPASSIPSPELREALRELTEEDDVHAVRSSLEYTEKVLESDDVDEAFDDFIEQLYPPRRRRKPKRRPRKRPPPRPNNRSQRRRQQYKRVQRLFRKDRKRLVKQILDGSPTSSTLPPVEDVEEVYRDRFSTPSPPDSAPFTSKPSNSALLGPITVEEVKKALKSMKRNSAPGPDGEITMKTLKSLPPKVLAAIFNVWLLMGRVPESLKECRTVLIPKSGDPDDVNNWRPITIGSLLLRLYAKILARRLSKAVNLNPRQKAFVPVDGCGENVAILDSVIRHARKRRKELHIVFLDLAKAFDTVSHDSILRALRRFGVPEHFVDIIRDLYDGATTTISCGDGETEPIPIRRGVKQGCPLSPILFNMVMDELLSSIGDEYGFELGDERISALAFADDLVLISDSRSGMERLLDQCEEFFDARSLKVNAKKCASLRLAPAPKRKTMKVVTEPTFRINGEPIPSVGPDDTVKYLGVQFSPSGKPKVKVDKLKDWLERLKKARLKPQQKIHMLRSYIIPRLMHQLRLGKVNKNTLKRLDRLIRRTVKKFLHLPPGTPTSFFHMPVKDGGLGLPSLRETVPVARLKLITRLASSDDPVVRAVAESDHWRKELRRCRRASDINSLKKELQKQRRERFTNTTQGRAHESFANSPAKNSWLHNGNTLSGREYINACKLLSNTLPTRVNLHRGRPDADKRCRRCGKTPETQAHVLQSCPATKGAITKRHNRVCDKIAKALRKKGWTVLREPRFRTPNGLLKPDLVVVKDDRVYVVDVTVPYENSADYLEERYREKVDKYEPLTEQVKKRYGAKDVEVLGIVIGARGTWCPRTNKVLRKLGLSKSTRRTLSMTALRGSLRIWRCFGTRSRSRRGKVPNRGAS

SEQ ID NO: 2279 - protein, 1057 aa, synthetic construct
  source 1..1057: note = MG140-218 reverse transcriptase ancestor
MLYPTTGEEPSKCPECGESFVSQKSLVKHLRRAHGGEEITWRCRKCHREYPNLRSVASHYRHCKGRPPSPEPSSKEFPCPECGRSFSTLAGLQLHRRRKHPEEYNESLPTPTGKRRRWSDEELRMLARAELDLPGSRHINQQLAERFPNRTIEAIRSIRKKPKYREILQELRETESADEDPSESGSTSDPDSSLPSPELREALRELTEADDVQAVRSALEYTEKVLESGDVDEAFDDLIEQVYPPRRRRKPKPRPRKRPPPRPNNRSQRRRQRYKRVQRLFKKDRKRLVKQILDGSPTQTTLPDVEDVEEVYRDRFSTPSPPDDAPFTSKPGNSASLGPITVEEVRKALKSMKRNSAPGPDGEITMKTLLSLPPKVLAAIFNTWLLLGRVPESLKECRTILIPKSGDPDDVNNWRPITIGSLLLRLYAKLLARRLSKAVNLNPRQKAFVPVDGCGENVAILDSVIRHARKRRKELHIVFLDLAKAFDTVSHDSILRALRRFGVPEHFVDIVRDLYDGATTTISCGDGETEPIPMRRGVKQGCPLSPILFNMVMDELLSSIGDEHGLKLGDEKISALAFADDLVLISGSRNGMERLLDQCEEFFDARSMKVNAKKSASLRLAPAPKRKTMKVVEEPTFKINGEPIPSVKPTEVVKYLGVQFSPSGKPKVKLDKLKDWLERLKKAPLKPQQKIQMLRSYIIPRLMHQLRLSKVNANTLKRLDRLIRRTVKKILHLPPGTPTDFFHMPVKDGGLGLPELRETVPVARLKLITRLRSSDDPVVRAVAESDHWKRELRWCRRASDLNSAKKELQKQRRERFTNTTTGRAHESFANSPAKNSWLHNGNTLSGREYILACHMLSNTLPTRVNLHRGRPDADKTCRRCGQTPETQAHVLQSCPATKGAITKRHNRVCDKIAKALRKKGWTVLREPRFRTPNGLLKPDLVVIKGDRVYVVDVTVPYDNSAEYLEERYREKVDKYEPLTEQVKKRYGAKEVEVLGIVIGARGLWCPATNKVLRKLGLSKSTRRTLSMTALRGSLRIWRCFGNRSKGRRGKVPDRGTS

SEQ ID NO: 2280 - protein, 1056 aa, synthetic construct
  source 1..1056: note = MG140-219 reverse transcriptase ancestor
MYPTTGEDPQECPKCNSSLIDTKQIVDHFRKKHHGVSVHWKCRKCERDWPNIRSVASHYRHCTGRPPSLEGPSKSHKCDECGRSFSTLAGLQLHRKRKHPEAYNESLPRPTGKNRPWGDDELKRLAGVELDLGGTKHINLKCQDHFPHRTIEAIASIRKTDRYRDILREIRETRSIEQETGEGATTSEPDSSIVEARLRSRIAELKSGDSSPSVRATLAYTERCLEDGNASSGLDLLPEEMYRPRKTSASKTNPGKRTPFRPQNRSQRRRQHYKQVQSLYKRDRKQAVGVILDGSPLQTVFPDVEKVDEVFRGRFSRPSPPDDAEFNSSPGGTLNMGYITAEEIQKCRDSMKKNNAPGPDREITMDVLLALELPVLELIFNTWLALGQVPAAFKEARTILIPKSGDASDPNNWRPITICSLISRLYAKLLASRLSKCANLSERQKAFVPVDGCGENTAILSSVIAHARKTKSQLHIVFLDLAKAFDTVPHTSILRALRRKALPEHFIDIVENLYTDATTSISVGDKNTSSIPMTSGVKQGCPLSPILFNLVLDELITNIGDDNGLDLGDKKIAILAFADDLVLISGTKDGMETNLKTCEEFFDARSMKLNARKSVSLSLVRAHKRKTMLTDERPKWKVHGEFLPTIKHTEEVKYLGVRYSAAGRPMAKLPKLDDWLQRLKKAPLKPQQRIQMVRSTITSRLIHTLRLSRVHAKLLKNLDRKIRSFVKSVLHLPSGTSTDFFYIPVRKGGLGLQEFMTLIPAAKLKLINSMKKSSDPAVIAAMEQDHWLREERWCRKVTSLQGNKEDAERRRLERYINSPTGKSQVGFANLPGQCNWLEGGAKLTGREYIVGCHMMSNTLPVRTRTFHGGRDRVTTCRYCPGVPETPSHALQSCPVVRNAVTKRHNLILTKIQHFLTPNYDSVIREPWFNGREGRMNPDLVLIQGKMVYVVDLTVPYDSSPEFIDSQAQRKVDKYDTLKPLLRQKFQAERVEVLGLAVGARGMYTSAGVQTCAKLGLSERQRRCMSMMALRQSCAIWGIFNSQPQGTLNKVPDTGTT

SEQ ID NO: 2281 - protein, 1246 aa, synthetic construct
  source 1..1246: note = MG140-220 reverse transcriptase ancestor
MVYNVPTTVNFGDHTSLWQKKHPPCKLLFVCGKCNKKFASIRGVSVHFRKCKGTRTKCNYCGRSFDTFKGLRAHQRRAHPAEYDRKLEVKKRRWSEEELERMARVEAGFPGGAVNQHLQGLFPGRTVDSIKSRRKNPEYKRLVSELKEGLAAAQKLKFGAPKEPTSINGTTPEADTTASQSPPDEPLLVRPSHSINGSAPRKEADVDYTRPSCGQAAVSAAKPVPPPPSIALLPAQTDTPNKRRLSSPSLPGGLPDSDAKAKRERGTPNRPLPSRLLPNTTSGSPTALPSRGPNQEAEPVPAVPPEAGSPEPAAVPEPVGDEAALQQPEAPIGDLMNIRSPSWSARDERAVALRTGGAPVAPLAGILPQAPPDRLNRASAAVSEFRAALESLFEAREGLRKVQSLVRKALLDGGEELEAELNEFIESLYTKAKPNNRRGPPAPKNYGTSRHRRGKRAARYKRFQHMFRKDRARLAEVILDGRELEEASELPSLEDVEDVYGNIFESASPEDDAPLTSPKPSVKLYYPITEEEVEKALNNMKSSAPGPDGITVEHLKRLPPKKLLALFNLVLLSGRFPPSWKKCRTVLIPKSGDRLDANNWRPITISSALVRLFHRILAKRLSSVVPLHPSQRGFVPTDGCFENVLILDAIIKEARAKNKELNVVSLDLRKAFDSVSHSSILRALRRHGIDERFVSYIMDSYRGCTTDISCGGNTTRPIKIKRGVKQGDPLSPILFNLVLDELLDNLPTPDCGVTIGTGERVPCLAYADDLVLLSDSKAGMRLLLRETEEFFSKRGMALNPKKCVSLRLATTKGRVVVDTKSVFSIDGEPIKAVGSADSFKYLGHRFDPTGKLKPNLEELEDWLERLKRAPLKPQQKLVLLRDHLIPKLLHKLTHGRVTKGLLKEFDRLVRRFVKRILHLPKHTPNAFLHAKVKDGGLGILSLREAIPLILLKRMRKLLGSSEDPVLREILNSEYLRKLLKRLKKLAGTVPTGEVSHEELQSSYDGRGLEQAASNPGSRSWLNSPPSFWSGRDFVRAVQLRCNTLPTRGNPSNPPGERKCRHGCKRTETLCHILQGCPLTHGARIRRHDRIVDLIAKKARKKWTVVWEPRIRHTDGGLRKPDLVIVKDDKVIVVDVSVSWEGPDSSLEAAWDRKRKKYENPEFLEALKRRYPGKPVTFLPLIIGARGVWCSSNRKVVKALGLSKALRDVVVVRCLEGSIKIWKSFMKRVWASDSAGRPDGVHERAAG

SEQ ID NO: 2282 - protein, 1246 aa, synthetic construct
  source 1..1246: note = MG140-221 reverse transcriptase ancestor
MAYNVPTTQNFGDHTSLWQRKAPPCKLLFVCGKCNKNFASQRGLSVHLRKCRSTRTKCNYCGRRFDTFKGIRQHQRRAHPAEYDRKLEAKKRRWSEEELERMARLEAGFAGGYINQHLQGVFPGRTVDSIKSRRKKPEYKKLVAQLKEELAAAQKLKFGAPKEPTSISGSTPPADSTASKSPPDEPLLVRSSHSVNGSAPRKEADVDYTRPSCGQAAVSAAKPVPPPPSIAPVPAQTDTPKKRRLSSPSAPGGAPDSDAKAKRDRGTPNRPLPSRLLPNTTSGSPTALPSRTPSQEAEPVPAVPPEAGSEEPAAPPEPAGDEAALQQPEAPIGSLMNIRSPSWSAREERAVALRTGGAPVAPLVGILPQAPPDRLNRASAAVSEFRAALESLFDAREPLRKIQSLVRSALLDGGEELEVRINEFIESLFTRAKPNNRRGPPRPKNYGSSRHGRGKRAARYKKYQNMFRKDRARLAEVILDGRELEEASELPSLEDVEDVYANIFESASPDDDEPLSSPEPSVKLYSPITEEEVELALNNMKSSAPGPDGITVPHLKRLPPNKLVCLFNIILLRGYFPPSWKECRTVLIPKAGDRLDANNWRPITISSALQRLFHRILAKRLSSVVPLHPNQRGFTSTDGVFANTLILDAIIKSRRAKGKPYNVVSLDLRKAFDSVSHSSILRALRRHGIDERFVSYIMDSYRGCTTTISCGGNTTRPIRIRRGVKQGDPLSPILFNLVLDELLDNLPTEDCGVTIGTGEKVPCLAYADDLVLLSDSKAGMRLLLAETEEFFSERGMALNPKKCVSLTVATTKGRVVVRTKSVFSIDGEPIKAVGSADSFKYLGHRFDATGKMKPNLDELETWLERLERAPLKPQQKLVILRDHLIPKLLHKLQSPRVTKKLLKEFDRLVRRFVKRILHLPKHTPNAFLHAKVRDGGLGILSLRDAIPLILLKRMRKLLGSSEDPVLSEILNSDYFRKLLERLLKLAGSVPTGEVRREALQNGYSGNGLQQAASNAGSRSWLNSPPSFWTGRDFVRAVQLRCNSLPTRGNPSNPPGERKCRAGCKRTETLCHILQGCPLTHGARIRRHNHIVDLIAKNARKKWEVEWEPRVRHTDGGLRKPDIVIVKDDKVIVVDVGVSWEGPDGSLEAAWDRKRKKYENPKFLEALKRRYPGKRVTFCPIIIGARGVWCSSNRRVVEALGLSKALRSTVVESCLKGGITIHRTFMKRVWASDNAGRPDGVHERAAG

SEQ ID NO: 2283 - protein, 1246 aa, synthetic construct
  source 1..1246: note = MG140-222 reverse transcriptase ancestor
MGYRVPTAQNAGDKTSSCQRDAPPANAQFVCASCNSRFDRKSGLSLHMRKCGNTRTKCNYCALRLGTFKSIRQHERRTHPAEYTRDLEAEKPQPDTEAFEKLARLEAGSAGGYVNIKAMSAATGLTIDQVRSRRKKPEYKRYLAMAKEELAAARKFKFAAPKEPTSIPASTPPGDSTASKSPPDQPVAVRSSNSADGSAPRKNANVDYTRPSCGQAAVSAAKPVPTPPSVAPVPCQTDTPKKRRLSSPSVPGGVDDSDAKAKRDRGSPQRPLPSRLLPNTTSGSPTAGPSRTPSQEAAPVPAVPPRAATEPPASPPTPAGDEAALQQPEAPITSCKRLRAPSLSPRLERAVALRTGGAPVAPLVGILPQAPPPRLNRDSAFASEFRGALEAILEAEEPVRKIHDLVRSALLDSNQELQVAIDEFLESIWSKKKPNGRRGPPRPKNYGSSRHGRGKRAAEYKKAQDMFRKDRKGLAEVILDGRDLYEPPELPSLQDVEDLYANIFESASPEDNEAVSSPKPQVRTFPPITEEDVELAMSNWQTSAPGPDGITIPQVKRMPPRVLATVFNIILLRGIFPSSWKELRTVLIPKGGDRTDANNWRPITIASALQRLFHRVLLRRLSSVTRLHPNQRGFRSTDGTFANVLILDAYIKSRRARGKAYNVVSLDLRKAFDSVSHNSILRALKRAGIDERLASYIMDSLRGCTTTIEVGGEATRPIAIKRGVKQGDPLSPLLFNLVLDEILDRISTEYRGGTIGSGTKVPVMAFADDLVLLSDSQLDVPLMLADIEEFFCQRGMAINPKKCVSISAATIKGRTIVRTKSIFSINGQPIPCVGSINSFKYLGHRFGATGMMKPNLPNLQTWLERVEKAPLKPHQKLCILRDHLIPKLLHGLQSPRVTGAILKEVDRLVRRFVKRILHLPIHTPNCFIHAKVRDGGLGILELRRAIPQILLKRMRKLLSNSEDPVLSSVLSSEHFRKILQRLSKLAGNVPTGELHREAIINGPSSAGLEAVADDAASRDWLHSKPQGWTGRDFVRAVHLRTNSLPTRGHPSNPPDQRKCRKGCQKNETLSHILQRCPAVHGVRIKRHNEIVGKIAKHARKKWEVEWEPHVRHTDGQLFKPDIVIHKDDKVVVVDVQVSWEGNDGSLAPAWDRKRAKYENPKFLEAATRRWPGKRVTFCPIIIGARGVWPSCNRPTVNGLGLSKALKSSCVESCLKWGSTIHKTFMRRVWANDNAGRPPGIAERAAG

SEQ ID NO: 2284 - protein, 1246 aa, synthetic construct
  source 1..1246: note = MG140-223 reverse transcriptase ancestor
MGDRVKTAQDAGSKTSSCQRDAPPANAQFVCVSCNSRFDRKSSLSLHSKSCGNTRTKCNYCTVSLTTYKLIRQHERRAHQAEYKRDLEAEKPQPDSASFEKLAALEAAAKGGVVSIKAMTTATGLTTHQIRTKREKPVYKKYLEMAKRDQAAKSKLLFGATSSPTSLSSSTSRTNATTTASPPSRAVTVQRQNSADGTAPRKNASSSYTRGPCPKASTSASPPGPPPPSVARIPSQTDDGKRRRLSSPSVPAGVPTSDRKKKRTQGSPQRPTPSRLLPNTTSASATGLPSRTPQQQASPGPDVPPAAPNKPASRPPAPAGDESALQQPEAPITSCKRLRSPSLSPQMQQAPALRTTSATVTPLRSRLPHAPPPRLNRDSAMASEFRQALEAVLEAEEPCPGIHRLVRSALSDNNDRLQVRIDEFWESTWPRTKPRERRRPPRPSNYGSVHHGRGRRAAEYKKAQDMFGKDKKGLADVILEGRELLTPPELPSLQQVEDVFAGIWESGSADDQQAATSPHIPVRSLPPIFEADVQLAREHWHKSAPGPDGITVPQVCRMDPRVLATVFNIILLRGVFPSSWRELRTVLIHKGGSRTDPNNWRPITIASALQRLFHRVLLRHLSSITTLHPSQRGFRSVDGTFANAVILDAYIKSRRAQGKAFNIVGLDLRKAFDSVSHNAISKALARAGVDERLATYILTSLTGCATQLDLGGKKSRPINIQRGVKQGDPLSPLLFNLVLDPILQHISTCFKGGTIPGGDKVPVIAFADDLFLLSDDDLEIPLMLHALEEYLTQQGLAINPRKCVSISAATIQGKSVVRTKSLFRISGSLIPCVGSVNSFKYMGHQFGEKGMMQSNLGNLRTWLERVLKAPLKPHQKMCLLRDHVIPKLLHGLSSPATTGDKLREADRLIRRFVKRTLHLQIHTANHFIHARIRDGGLGILELRKAIPEITLRRCRGLLNATDDPVLASFTSSDHFQKLLNRLSKLAGTVPSTEVHRELIITGPSSAGLEAVADDPASRQWLQSKPQGWTGRDFVRAVHLRTNNLPTRDHPSNPPELRKCRDGCEKNESLRHILQQCPRVQGLRIRRHNEIASKIARAARKKWEVEWEPHVKHNDRQLYKPDLAIHKPDQLVIVDVQVSWEGKENSLAVAWDAKRNKYTTPHFLEAAARRWPGRRVTTLPVILGARGIWPSCNRTTVNTLNLSSALRRSCVESCLKWGSTIHKTFMASVWASSTRGRPQGLSSRSAG

SEQ ID NO: 2285 - protein, 1247 aa, synthetic construct
  source 1..1247: note = MG140-224 reverse transcriptase ancestor
MTSTAANSEADSAGTDKGCNEAAPAKKVTYVCGKCNKSFENVNGVACHFPKCKGTEFPCPYCGRSFSTKRGLSQHRRRAHPEEYNEELPTGKAGKKRRWSEMLARMEAELPGSTINQQLAERFPNRTLEAIKGQRRKPKYRELLQELREEAADSEKPAGAPPAEDPGISDPPSESESAAGAASPDDPVSEPGPRTPDGTVPSPPADAKNKKEPVPPLKTLAEPPPPLPPSTATTPGQLDDPKTLSPASPGAEPPLADSDTVKKNDVGEPGGPPPSRTEPPGTGDVPTPGPAPSGEADGPPGSDPDPSSDSEPDDVADDDGGAEAALNQPEAPITLLKLASPPDWRPRPPHVSALRTGGAPVAPLAGRLPQVPEEALKELAELAGATRESLEEVLEANAARQRVQTLLDEVLLGDGDDVDKALDDFIEQLFGAHRPKRRRRRPRPKPSPTPKNRRQRRRQQYARVQRLFRKNRKRLAKQILDGNESLEASSPPPVEDVEEVYRDIFETPSPPDNAPFTSKPSNTDLFHPITAEEVKKALKSMKNSAPGPDGITVKDLKKLPPKVLAALFNLVLLTGRVPSSWKKCRTVLIPKSGDPLDANNWRPITISSVLLRLFHRILARRLSKAVNLNPRQRGFVPVDGCFENVMLLDSIIRHARRRRKELNIVFLDLRKAFDSVSHDSILRALRRMGVDEHFVDYIRNLYEGCTTTISCGGQKTEPIRIRRGVKQGDPLSPILFNMVMDELLSSLPDTEIGFKLGTDQRISALAFADDLVLISDSRAGMQRLLDQVEEFFDARGLKLNAKKCASLSLKPSGKKVVVDTEPTFRINGEPIPAVGPDDTFKYLGVQFGPSGKTKPTVDKLKDMLERLSRAPLKPQQKLVILRTHIIPRLLHQLTLGRVSKNLLKRLDRLIRRAVKKILHLPHDTPNAFFHAPVKDGGLGIPSLRETVPMMLLRRLERLLASSDDPVIRAVAKSEHFRKLLRRCSRMLGVGGSLKEEMEQLYNSVDGRGLEQFSNNPASNSWLHNPTSLLSGREFINAIKLRCNTLPTRANASRGDADRRCRHCGQRTETLSHILQSCPATHGMRIKRHNRICDLIAKKLRKKWTVIREPRIRTPNGKLRKPDLVVVKDDRVFVVDVTVTWENPDSSLEEAWREKVDKYDTEELTEQVKKRYGAKDVEFLPIVIGARGVWSPKNNKVLKQLGLSKSTRKTLVVRALEGSLRIWRCFMRSTSSKRRRGRPGGVPNRGAG

SEQ ID NO: 2286 - protein, 1247 aa, synthetic construct
  source 1..1247: note = MG140-225 reverse transcriptase ancestor
MTSTAAKSEADSGGTDKGCNEAAPPAKVKYVCGKCNKSFENVNGVACHFPKCKGTEFPCPYCGRSFSTKRGLSQHQRRAHPEEYNKELPTGKAGKKRRWSEMLARMEAELPGSAINQQLAERFPNRTLEAIKGQRRKPKYKELLQELREEAADSEKPAGAPPAEDPAISDPPSPGEASAGAASPDDPVSEPGPRTPDGTVPSPPADAKNKKEPVPPLKTLAEPPPPLPPSVATTPGQLDDPKTLKPASPGAEPPLADSDAVKKNDVGEPGGPPPSRTEPPGTGDVPTPGPAPSPEADGPPGSDPPPSSDSEPDDVPDEDGGAEAALNQPEAPITLLKLASPPDWRPRPPHVSALRTGGAPVAPLAGRLPQVPPEALKELAALAGETREALEEVLEANAARQRVQTLLDEVLLGDGDDVDKALDEFIEQLFGAHRPKRRRRRPRPKPSPTPRNRRQRRAQQYARVQRLFRKNRKRLAKMILDGKESLEASSPPPVEDVEDVYRDIFETPSPPDNAPFESKPSNVDLFHPITAEEVKKALKNMKNSAPGPDGITVKDLKKLPPKVLAALFNLVLLTGRVPSSWKECRTVLIPKSGDPLDANNWRPITISSVLLRLFHRILARRLSKAVNLHPRQRGFVPVDGCFENVMLLDSIIRHARRRRKELNIVSLDLRKAFDSVSHNSILRALRRMGVDEHFVDYIRNLYEGCTTTISCGGQKTEPIRIRRGVKQGDPLSPILFNMVMDELLSSLPDTEIGFKLGTGERVSCLAFADDLVLISDSRAGMQRLLDQVEEFFDKRGLKLNAKKCASLSLKPSKKKVVVDTEPTFRINGEPIPAVGPSDTFKYLGVQFGPSGKTKPNVDKLKDWLDRLTRAPLKPQQKLVILRTHLIPRLLHKLTLGRVSKNLLKKLDRLIRRAVKKILHLPHDTPNAFFHAPVRDGGLGILSLRETVPLMLLRRLERLLASSDDPVIRAVAKSEHFRKLLRRCSRMAGVGGSAKEELEQLYNSYDGRGLQQFANNPASRSWLHNPPSFWSGREFINAVQLRCNTLPTRARASRGDADRRCRACCQRTETLSHILQSCPATHGARIKRHNRICDLIAKKARKKWTVIREPRIRTPNGKLRKPDLVVVKDDRVFVVDVQVAWENPDSSLEEAWREKVDKYDTEELTEQVKKRYGAKEVEFCPIVIGARGVWSPANNKVVKALGLSKSTRKTLVVRALEGSLRIWRCFMRSTSSKRRRGRPGGVPNRGAG

SEQ ID NO: 2287 - protein, 1247 aa, synthetic construct
  source 1..1247: note = MG140-226 reverse transcriptase ancestor
MTGTSVKTEQDSGDSSSGCEEAAPPAKVRFVCGKCNKNFENERGLACHLRKCRGRETPCPYCGRRFSTFKGIRQHQRRAHPEEYNRELEAGKAGPNRRWSERLARMEAELPGSTINQQLAEAFPGRTIEAIKSRRRKPEYKELLEQLREELAEAKKPAGAPPGEEPALPDPPSPGEATASASPPDEPVSAPGPNSPDGTPPRKDGDVEYKREPVPPASTAAEPPAPLPPSVATVPSQTDDPKRRKPAAPSAEPPLADSDAVKKRDLGEPGRPPPSRLQPPGTGGVPTAGPAPTPEEEAAPGPDVPPSAESEPDAVPPEPAGDEAALNQPEAPITTLKRLRPPAWSPREPRAAALRTGGAPVAPLAGRLPQVPPDALKEAAALASETREALEEVLEAEAACPKIHSLLDEVLLGDNDDLLKALDEFIEEIFGTHRPKGRRGRPRPKNRGTSRNRRGRRAAQYKRAQNMFRKDRKRLAEVILDGRELLEASELPSVEDVEDVYRDIFESPSPDDDAPFESPESQVDLFSPITAEEVEKALNNMKSSAPGPDGITVKDLKKLPPRVLAALFNIILLTGYVPSSWKECRTVLIPKSGDPLDANNWRPITISSALQRLFHRILARRLSKAVPLHPNQRGFRPVDGVFANVLILDAIIRSRRARGKPYNIVSLDLRKAFDTVSHNSILRALRRMGVDERFVDYIMDSYRGCTTTISCGGQKTRPIRIRRGVKQGDPLSPLLFNLVLDELLSSLPDVETGFRLGTGERVSCLAFADDLVLLSDSRAGMQLLLDQVEEFFSARGMALNAKKCASLSVAPSKGKVVVRTEPVFRINGEPIPAVGPTDTFKYLGHRFGATGKTKPNLDKLKDWLERLTRAPLKPQQKLVILRSHLIPRLLHKLQSPRVTKNLLKKLDRLIRRAVKRILHLPRDTPNAFLHAPVRDGGLGILSLRETIPLILLRRMRRLLGSSEDPVIRAVLKSEHFRKLLKRLSRLAGAVPTAKEHREALYNGYSGNGLQQVANNPASRSWLHNPPSFWSGRDFVRAVQLRCNTLPTRGHPSNPPDERRCRAGCQRTETLSHILQKCPATHGARIKRHNRIVDLIAKHARKKWTVEREPRIRTSDGQLRKPDLVVVKDDRVLVVDVQVSWEGPDSSLEEAWEEKRDKYENPEFLEAVKRRYPGREVEFCPIIIGARGVWAPSNRRVVEALGLSKSTRKTVVERCLKGGITIHRTFMKRVWSKRRRGRPDGVPNRGAG

SEQ ID NO: 2288 - protein, 1246 aa, synthetic construct
  source 1..1246: note = MG140-227 reverse transcriptase ancestor
MGDRVKTAQDAGSKTSGCQRDAPPANAQFVCASCNSRFDRKSGLSLHMRKCGNTRTKCKYCALRLSTFKSIRQHERRAHPAEYTRDLEAEKPSPDTEYFEKLARIEAGSAGGVINIKAMSAATGLTIDQVRSRRKKPEYKKYLEMAKEELAAARKLKFAAPSEPVSVPASASPGDSTTSASPPDQPVTVRRSNSPDGTPPRKNANVDYTRPPCPKAATAAAKPAPTPPSVAPVPCQTDDPKRRRRESPSADPGVPDSDAVKKRDRGPPLRPTPSRLQPPTTSGSPTAGPSWTPQQEAAPGPDVPPAAETEPPASPPTPAGDEAALAQPEAPITTCKRLRAPSLSPRLPRAPALRTGGAPVAPLVGRLPQVPPPRLRRDSALASELRQALEAVLTAEAACPKIHKLVKSALLGSNEELLVAIDEFLDSIWSKKKPRGRRGKPRPKNYGSSRGGRGRRAAEYKKAQDLFRKDRKGLAEVILDGRDLLEPPELPSLQDVEDLYGNIFESASPDDNEAVSSPHPQVNTFPPITEEDVQKAMENWQTSAPGPDGITIPDVKKMPPRVLATVFNIILLRGIVPSSWKELRTVLIPKGGDRTDANNWRPITIGSALQRLFHRVLLRRLSDATSLHPNQRGFRSVDGTFANVLILDAYIRSRRARGKAYNIVSLDLRKAFDTVSHNSILRALKRAGVDERLASYIMDSLRGCTTTIKVGGEKTRPINIKRGVKQGDPLSPLLFNLVLDEILDHISTEYKGGTIGSGTKVPVMAFADDLVLLSDSQLDVPLMLHEIEEFFCQRGMAINPKKCVSISAAPVKGKTIVRTKSIFRINGQPIPCVGSINSFKYLGHRFGATGMNKPNLPNLQTWLERVSKAPLKPHQKLCILRDHLIPKLLHGLQSPRVTGDILKEVDRLIRRFVKRILHLPIHTPNAFIHARVRDGGLGILELRHAIPQILLRRMRKLLSSAEDPVISSVLQSEHFRKILQRLSKLAGTVPTGQAHREAIINGPSSAGLQAVADDPASRQWLHSKPQGWTGRDFVRAVHLRTNSLPTRGHPSNPPDQRKCRAGCQKNETLSHILQRCPAVHGVRIKRHNEIVGKIAKHARKKWTVEREPHVRHTDGQLFKPDLVIHKDDKVVVVDVQVSWEGNDSSLAPAWERKRAKYENPEFLEAATRRWPGRRVTFCPIIIGARGVWPRCNRPTVNGLGLSKALKRSCVESCLKWGSTIHRTFMRRVWANSRRGRPPGIASRAAG

SEQ ID NO: 2289 - protein, 1246 aa, synthetic construct
  source 1..1246: note = MG140-228 reverse transcriptase ancestor
MGDRVKTAQDAGSKTSSCQRDAPPANAQFVCVSCNSRFDRKSSLSLHSKSCGNTRTKCNYCTVSLTTYKLIRQHERRAHQAEYKRDLEAEKPTPDSAYFEKLAAMEAASKGGVVSIKAMTTATGLTTHQIRTKREKPVYKKYLEMAKRDQAAKSKLLFGATSSAISPSTSTSAANATTTASPPNRAVTVSRQHSADGTPPRKNASTSYTRGPCPKASTSASPPGPPPPSVATIPSQTDDGKRRRLSSPTVPAGVPTSDTKKKRTQGSPLRPTPSRLQPNTTSGSATATPARTPQENASPGPDVPPAAPSKPADRPPAPAGDESALQQPEAPITSCKRLRSPSLSPQMPQAPALRTNSATVTPLRSRLPHAPPPRLNRDSAMASEFRQALEAVLEAEEPCPGIHKLVTSALSDNNDRLQVAIDEFWESTWPTEKPRERRRPPRPSNYGSVHHGRGRRAAEYKKAQDLFGKDKKGLADVILEGRELLTPPELPSLQQVEDVFAGIWESGSADDQQAATSPHISVPSLPPIFEADVQLAREHWQKSAPGPDGITIPQVCRMDPRVLATVFNIILLRGVVPSSWRELRTVLIHKGGSRTDPNNWRPITIASALQRLFHRVLLRHLSSITTLHPSQRGFRSVDGTFANAVILDAYIRSRRAQGKAFNIVGLDLRKAFDSVSHNAISKALARAGVDERLATYILTSLTGCATQLELGGKKSRPINIQRGVKQGDPLSPLLFNLVLDPILQHISTCFKGGTIPGGDKVPVIAFADDLFLLSDDDLEIPLMLHALEEYLTQQGLAINPRKCVSISAATIQGKTVVRTKSLFRISGSLIPCVGSVNSFKYMGHQFGEKGMQQSNLGNLRTWLERVSKAPLKPHQKMCLLRDHVIPKLLHGLSSPATTGDKLREADRLIRRFVKRTLHLQIHTANHFIHARIRDGGLGILELRKAIPEITLRRCRGLLNATDDPVLASFTSSEHFQKLLNRLSKLAGTVPSTEAHREQIITGPSSAGLEAVADDPASRQWLQSKPQGWTGRDFVRAVHLRTNNLPTRDHPSNPPELRKCRAGCQKNESLRHILQQCPRVQGLRIKRHNEIASKIARAARKKWTVEWEPHVKHEDRQLFKPDLAIHKPDQLVIVDVQVSWEGKENSLAEAWDAKRNKYTTPEFLEAAARRWPGRRVTTLPVILGARGIWPSCNRTTVNTLNLSSALRRSCVESCLKWGSTIHRTFMASVWAQSRRGRPQGLSSRSAG

SEQ ID NO: 2290 - protein, 251 aa, synthetic construct
  source 1..251: note = MG160-488 reverse transcriptase ancestor
MTQKWTHRFELKPGRWVFVPTPESRARGEEIKKAVEKRWKPPSFYYHLRNGGHVAALRSHVDNKYFFRADIDDFFGRVNRSRVTRCLKSYFSYAEAREMANESVVKHPGHNKFMLPYGFVQSPILASLALDKSRLGRYLRKLNKRKGLTVSVYVDDIIISSNDESLLGEVAEELKQLAEKARFPLNAEKTEGPAEAITAFNIELSHGSLKITPERMEEFREAYQSASSEHQKAGILGYVNSVNPAQVASLA

SEQ ID NO: 2291 - protein, 251 aa, synthetic construct
  source 1..251: note = MG160-489 reverse transcriptase ancestor
MTQKWTHRFELKPGRWVFVPTPESRARGAEIKKAVEKRWKPPSFYYHLRNGGHVAALRSHVDNKYFFRADIDDFFGRVNRSRVTRCLKSYFSYAEAREMANESVVKHPGHNKFILPYGFVQSPILASLALDKSRLGRYLRKLNKRKGLTVSVYVDDIIISSNDEALLGEVAEELKQLAEKALFPLNAEKTEGPAEAITAFNIELSHGSLRITPERMEEFREAYQSASSEHQKAGILGYVNSVNPAQVASLA

SEQ ID NO: 2292 - protein, 251 aa, synthetic construct
  source 1..251: note = MG160-490 reverse transcriptase ancestor
MTQKWTHRYQLKPGRWVFVPTDEAKKTGARIKRAVEARWKPPNFYFHLRKGGHVAAVRSHVENKYFFRADLDDFFGRVNRSRVTRCLKSWFSYAEAREMASESVVKRPGHEGFILPYGFVQSPILASLALDKSKLGRYLRKLNRRSDLTVSVYVDDIIISSNDESQLGEVAERLKQLADKALFPLSASKTEGPAEEVTAFNIELSHGALRITDERMAELRADYQSATSEHSKAGILGYVDSVNPAQVASLA

SEQ ID NO: 2293 - protein, 251 aa, synthetic construct
  source 1..251: note = MG160-491 reverse transcriptase ancestor
MTQKWTHRYQLKPGRWVFAPTDEAKKTGARIKRAVEAHWKPPNFYFHLRNGGHVAAVRSHVASKYFFRADLDDFFGRVNRSRVTRCLKSWFSYAEAREMASESVVKRPGHEGFVLPYGFVQSPILASLALDKSKLGSYLRKLNGRSDLTVSVYVDDIIISSDDESQLGEVAERLKQLADKALFPLSASKTEGPAEEVTAFNIELSHAALRITDERMAELRADYQSATSEHSKAGILGYVDSVNPAQAASLK

SEQ ID NO: 2294 - protein, 251 aa, synthetic construct
  source 1..251: note = MG160-492 reverse transcriptase ancestor
MTQKWTHRYQLKPGRWVFAPTDEAKKTGARIKRAVAAHWKPPNFYFHLRNGGHVAAVRSHVASKYFFRADLDDFFGRVNRSRVTRCLKSWFSYAEAREMASESVVKRPGHNGFVLPYGFVQSPILASLALDKSKLGSYLRKLNGRSDLTVSVYVDDIIISSDDESQLGEVAARLKQLADKALFPLSASKTEGPASGVTAFNIELSHAALRITDERLAELRADYQAAASEHSKAGILSYVHSVNPAQAASLK

SEQ ID NO: 2295 - protein, 251 aa, synthetic construct
  source 1..251: note = MG160-493 reverse transcriptase ancestor
MSQKWTHRFEIKPGKWVFVPSDESRQHGKKIKKQIEKRWKPPDYYYHLRNGGHVAALKSHLNNKYFLRLDIKNFFGSINRSRVTRALKKFFSYEEAREIANESTVRHPNNKKYILPFGFVQSPILASLCLDKSALGRYLHKLNKNNGITVSVYMDDIIISSNDQEQLQEVLEEIKTAAEKSGFPLNEEKTQGPSDKITAFNIELSHGNLKITDERMNEFMEAYKNSNSEHQREGILNYVRSVNPAQAEQLA

SEQ ID NO: 2296 - protein, 251 aa, synthetic construct
  source 1..251: note = MG160-494 reverse transcriptase ancestor
MMEKWKHKFEIKKDRWVYVPSKEMLQFGKKIHKYIRKKWKPPLYFYHLRDGGHVAAAKLHLNNKYFALIDISNFFESTSQSRVTRELKKFIPYEKAREIAKLSTVRNPNSTKYVIPYGYPQSPILATLCLHNSYCGNVINSINKSGNVTVSVYMDDIIISSNDLNLLNEAFDLILEALEKSGYQINENKTQSPSKKIKVFNLELSHNSLRVTPKRMVEFLQAYAKSKNEHEREGIASYVGSVNPQQAKLFP

SEQ ID NO: 2297 - protein, 251 aa, synthetic construct
  source 1..251: note = MG160-495 reverse transcriptase ancestor
MMEMWKHKFEIKKDRWVYVPSKEMLQFGKKIHKYIRKKWKPPLYFYHLRNGGHVAAAKLHLNNKYFALIDISNFFESTSQSRVTRELKKFIPYEKAREIAKLSTVRVPNSKKYAIPYGYPQSPILATLCLHNSYAGNVIDSINKSGNVTVSVYMDDIIISSNDLNVLNEAFDLICTALEKSKYQINEDKTQSPSKKIKVFNLELSHNSLRVTPKRMVEFIQAYAKSENEHEREGIASYVRSVNPQQAKRFP

SEQ ID NO: 2298 - protein, 251 aa, synthetic construct
  source 1..251: note = MG160-496 reverse transcriptase ancestor
MMEMWKHKFEIKKDRWVHVPSKEMVLFGKKIHKFIRRKWKPPLYYYHLRNGGHVAAAKLHLNNDYFALIDISNFFESTSQSRVTRELKKIIPYNKAREIAKLSTVRVPNSKKFSIPYGYPQSPILATLCLHNSYAGNVIDSINKSGNVTVSVYMDDIIISSNDLNVLNEAFDLICTALKKSRYQINVDKTQSPSKKIKVFNLELSHNHLKVTSKRMVQFIQAYAKSENEYEREGIAAYVRSVNPQQANRFP

SEQ ID NO: 2299 - protein, 251 aa, synthetic construct
  source 1..251: note = MG160-497 reverse transcriptase ancestor
MMEMWKHKFEIKKDRWVHVPSKEMVLFGKKLHKFIRRKWKPPLYYYHLRNGGHVAAAKLHKNNDYFSLIDISNFFESTSQSRVTRELKKIIPYEKAREIAKLSTVRVPNSKKFSIPYGYPQSPILATLCLHNSYAGNVIDSINKSGNVTVSVYMDDIILSSKDLNVLNEAFDLICTALKKSRYQINVDKTQSPSKKIKVFNLELSHNHLKVTSERMVQFIQAYAKSQNEYEREGIAAYVRSVNPQQANRFP

SEQ ID NO: 2300 - protein, 251 aa, synthetic construct
  source 1..251: note = MG160-498 reverse transcriptase ancestor
MMEMWKHKFEIKKDRWVHVPSKEMVLFGKKLHKFIRRKWKPPLYYYHLRNGGHVAAAKMHKNNDYFSLIDISNFFESTSQSRVTRELKKIIPYEKAREIAKLSTVRVPNSKKFSIPYGYPQSPILASLCLHNSYAGNVLDSINKSGNVLVSVYMDDIILSSKDLNVLNEAFDLICTALKKSRYQINIDKTQSPSKKIKVFNLELSHDHLKVSSERMVQFIQAYAKSQNEYEREGIAAYVRSVNPQQANLFP

SEQ ID NO: 2301 - protein, 251 aa, synthetic construct
  source 1..251: note = MG160-499 reverse transcriptase ancestor
MSQPWTHRFEIKPGRWVYVPSDESRQHGKKIKKQIKKRWKPPDYYYHLRNGGHVAALKSHLNNKYFASLDIKNFFGSISRSRVTRALKKFFSYEEAREIAKQSTVRHPNNHKYSLPFGFVQSPILASLCLDKSALGRYLHKLNKNKGITVSVYMDDIIISSNDQEELQEAFEELKEAAEKSNFPLNEEKTQGPSDKITAFNIELSHGNLKITDERMSEFMEAYQNSNSEHQREGILSYVRSVNPAQAKQLA

SEQ ID NO: 2302 - protein, 251 aa, synthetic construct
  source 1..251: note = MG160-500 reverse transcriptase ancestor
MSQPWTHRFEIKPGRWVYVPSDESREHGKKIKKQIKKRWKAPDYYYHLRNGGHVKALKSHTNNKYFASLDIKNFFGSISRSRVTRALKKRFSYEEAREIAVQSTVRHPNNHKYSLPFGFVQSPILASICLDKSALGRYLHKLSKNKGLTVSVYMDDIIISSNDQEELQEAFDELKEAAEKSNFPLNEEKTQQPSDKITAFNIELSHNNLKITDERYSQFMEAYQSSNSEYQREGILSYVRSVNPAQAKQLK

SEQ ID NO: 2303 - protein, 251 aa, synthetic construct
  source 1..251: note = MG160-501 reverse transcriptase ancestor
MNQPWKHRFEIKPGRWVYVPSDESLEHGKKIKKQIKKRWKAPDYYYHLRNGGHVKALKSHTDNKYFASLDIENFFGSISRSRVTRALKKRFSYEQAREIAVQSTVRHPNNHKYSLPFGFVQSTILASICLDKSALGRYLHKLSKNKGLTVSVYVDDIIISSNDQEELQKAFDELKEAATKSNFPLNEEKVQQVSDKITAFNIELSHNNLKITDERYSQFLEAYQSSNSEYQREGILSYVRSVNPAQANQLK

SEQ ID NO: 2304 - protein, 251 aa, synthetic construct
  source 1..251: note = MG160-502 reverse transcriptase ancestor
MNQPWKHRFEIKPGRWVYVPTDESLEHGKKIKKQIKKRWKAPSYYYHLHEGGHVKAIQSHTDNKYFASLDIENFFGSISRSRVTRSLKKRFSYEQAREIAVQSTVRHPNEHKYSLPYGFPQSTILASICLDQSALGRYLHSLSKNRGLTVSVYVDDIIISSNDQEELQKASDELKEAAVKSNLPFNKEKVQQVSDKITAFNIELSHNNLKITDERYSQFLEAYQASNNEYTREGILSYVRSVNPAQANQLR

SEQ ID NO: 2305 - protein, 251 aa, synthetic construct
  source 1..251: note = MG160-503 reverse transcriptase ancestor
MTLPWKDRFQVKPGRWVYIPTQETLEQGRQIKALVAEKFQAPSFYYHLHEGGHVAAIQSHTDDRYFLNVDIENFFGAINRSRVTRSLKKRFPYAQAREITVQSTVRVTNEYEYHLPYGYPQSTILASICLFDSALGRYLHSLSAQHNLTVSVYVDDIIISGNDHAELQQISDTLVEKSVASRLPFGRKKVTQVSDRITAFNIELSHHTMKITDQRYNQLLQQALLTDNENVIEGILSYVRSVNPRQHNNMR

SEQ ID NO: 2306 - protein, 251 aa, synthetic construct
  source 1..251: note = MG160-4_H230R
VTQKWTHRYQLKPGRWVFAPTDEAKKCGAHIKRSVASRWKAPNFYYHLRNGGHVAAVRSHELSRFFFRADLDDFFGRVNRSRVTRCLKPWFSYAEAREMASESVVKRPGETAFVLPYGFVQSPILASLALDKSKLGSLLRSLDGGRDFTVSVYVDDIIISGDDEAQLKEVASRLERVASEALFPLSSGKTQGPASGVTVFNIELSHRMLRITDDRLASLRLDYQATASERCKAGIVSYVYSVNPDQVAQVT

SEQ ID NO: 2307 - protein, 5 aa, synthetic construct
  source 1..5: note = MG160-4_Inactive
VTQKW

SEQ ID NO: 2308 - protein, 251 aa, synthetic construct
  source 1..251: note = MG160-4_T2S
VSQKWTHRYQLKPGRWVFAPTDEAKKCGAHIKRSVASRWKAPNFYYHLRNGGHVAAVRSHELSRFFFRADLDDFFGRVNRSRVTRCLKPWFSYAEAREMASESVVKRPGETAFVLPYGFVQSPILASLALDKSKLGSLLRSLDGGRDFTVSVYVDDIIISGDDEAQLKEVASRLERVASEALFPLSSGKTQGPASGVTVFNIELSHRMLRITDDRLASLRLDYQATASERCKAGIVSYVYSVNPDQVAQVT

SEQ ID NO: 2309 - protein, 251 aa, synthetic construct
  source 1..251: note = MG160-4_K4R
VTQRWTHRYQLKPGRWVFAPTDEAKKCGAHIKRSVASRWKAPNFYYHLRNGGHVAAVRSHELSRFFFRADLDDFFGRVNRSRVTRCLKPWFSYAEAREMASESVVKRPGETAFVLPYGFVQSPILASLALDKSKLGSLLRSLDGGRDFTVSVYVDDIIISGDDEAQLKEVASRLERVASEALFPLSSGKTQGPASGVTVFNIELSHRMLRITDDRLASLRLDYQATASERCKAGIVSYVYSVNPDQVAQVT

SEQ ID NO: 2310 - protein, 251 aa, synthetic construct
  source 1..251: note = MG160-4_T6K
VTQKWKHRYQLKPGRWVFAPTDEAKKCGAHIKRSVASRWKAPNFYYHLRNGGHVAAVRSHELSRFFFRADLDDFFGRVNRSRVTRCLKPWFSYAEAREMASESVVKRPGETAFVLPYGFVQSPILASLALDKSKLGSLLRSLDGGRDFTVSVYVDDIIISGDDEAQLKEVASRLERVASEALFPLSSGKTQGPASGVTVFNIELSHRMLRITDDRLASLRLDYQATASERCKAGIVSYVYSVNPDQVAQVT

SEQ ID NO: 2311 - protein, 251 aa, synthetic construct
  source 1..251: note = MG160-4_T6V
VTQKWVHRYQLKPGRWVFAPTDEAKKCGAHIKRSVASRWKAPNFYYHLRNGGHVAAVRSHELSRFFFRADLDDFFGRVNRSRVTRCLKPWFSYAEAREMASESVVKRPGETAFVLPYGFVQSPILASLALDKSKLGSLLRSLDGGRDFTVSVYVDDIIISGDDEAQLKEVASRLERVASEALFPLSSGKTQGPASGVTVFNIELSHRMLRITDDRLASLRLDYQATASERCKAGIVSYVYSVNPDQVAQVT

SEQ ID NO: 2312 - protein, 251 aa, synthetic construct
  source 1..251: note = MG160-4_H7R
VTQKWTRRYQLKPGRWVFAPTDEAKKCGAHIKRSVASRWKAPNFYYHLRNGGHVAAVRSHELSRFFFRADLDDFFGRVNRSRVTRCLKPWFSYAEAREMASESVVKRPGETAFVLPYGFVQSPILASLALDKSKLGSLLRSLDGGRDFTVSVYVDDIIISGDDEAQLKEVASRLERVASEALFPLSSGKTQGPASGVTVFNIELSHRMLRITDDRLASLRLDYQATASERCKAGIVSYVYSVNPDQVAQVT

SEQ ID NO: 2313 - protein, 251 aa, synthetic construct
  source 1..251: note = MG160-4_L11I
VTQKWTHRYQIKPGRWVFAPTDEAKKCGAHIKRSVASRWKAPNFYYHLRNGGHVAAVRSHELSRFFFRADLDDFFGRVNRSRVTRCLKPWFSYAEAREMASESVVKRPGETAFVLPYGFVQSPILASLALDKSKLGSLLRSLDGGRDFTVSVYVDDIIISGDDEAQLKEVASRLERVASEALFPLSSGKTQGPASGVTVFNIELSHRMLRITDDRLASLRLDYQATASERCKAGIVSYVYSVNPDQVAQVT

SEQ ID NO: 2314 - protein, 251 aa, synthetic construct
  source 1..251: note = MG160-4_L11R
VTQKWTHRYQRKPGRWVFAPTDEAKKCGAHIKRSVASRWKAPNFYYHLRNGGHVAAVRSHELSRFFFRADLDDFFGRVNRSRVTRCLKPWFSYAEAREMASESVVKRPGETAFVLPYGFVQSPILASLALDKSKLGSLLRSLDGGRDFTVSVYVDDIIISGDDEAQLKEVASRLERVASEALFPLSSGKTQGPASGVTVFNIELSHRMLRITDDRLASLRLDYQATASERCKAGIVSYVYSVNPDQVAQVT

SEQ ID NO: 2315 - protein, 251 aa, synthetic construct
  source 1..251: note = MG160-4_V17R
VTQKWTHRYQLKPGRWRFAPTDEAKKCGAHIKRSVASRWKAPNFYYHLRNGGHVAAVRSHELSRFFFRADLDDFFGRVNRSRVTRCLKPWFSYAEAREMASESVVKRPGETAFVLPYGFVQSPILASLALDKSKLGSLLRSLDGGRDFTVSVYVDDIIISGDDEAQLKEVASRLERVASEALFPLSSGKTQGPASGVTVFNIELSHRMLRITDDRLASLRLDYQATASERCKAGIVSYVYSVNPDQVAQVT

SEQ ID NO: 2316 - protein, 251 aa, synthetic construct
  source 1..251: note = MG160-4_A19V
VTQKWTHRYQLKPGRWVFVPTDEAKKCGAHIKRSVASRWKAPNFYYHLRNGGHVAAVRSHELSRFFFRADLDDFFGRVNRSRVTRCLKPWFSYAEAREMASESVVKRPGETAFVLPYGFVQSPILASLALDKSKLGSLLRSLDGGRDFTVSVYVDDIIISGDDEAQLKEVASRLERVASEALFPLSSGKTQGPASGVTVFNIELSHRMLRITDDRLASLRLDYQATASERCKAGIVSYVYSVNPDQVAQVT

SEQ ID NO: 2317 - protein, 251 aa, synthetic construct
  source 1..251: note = MG160-4_A19R
VTQKWTHRYQLKPGRWVFRPTDEAKKCGAHIKRSVASRWKAPNFYYHLRNGGHVAAVRSHELSRFFFRADLDDFFGRVNRSRVTRCLKPWFSYAEAREMASESVVKRPGETAFVLPYGFVQSPILASLALDKSKLGSLLRSLDGGRDFTVSVYVDDIIISGDDEAQLKEVASRLERVASEALFPLSSGKTQGPASGVTVFNIELSHRMLRITDDRLASLRLDYQATASERCKAGIVSYVYSVNPDQVAQVT

SEQ ID NO: 2318 - protein, 251 aa, synthetic construct
  source 1..251: note = MG160-4_T21R
VTQKWTHRYQLKPGRWVFAPRDEAKKCGAHIKRSVASRWKAPNFYYHLRNGGHVAAVRSHELSRFFFRADLDDFFGRVNRSRVTRCLKPWFSYAEAREMASESVVKRPGETAFVLPYGFVQSPILASLALDKSKLGSLLRSLDGGRDFTVSVYVDDIIISGDDEAQLKEVASRLERVASEALFPLSSGKTQGPASGVTVFNIELSHRMLRITDDRLASLRLDYQATASERCKAGIVSYVYSVNPDQVAQVT

SEQ ID NO: 2319 - protein, 251 aa, synthetic construct
  source 1..251: note = MG160-4_T21N
VTQKWTHRYQLKPGRWVFAPNDEAKKCGAHIKRSVASRWKAPNFYYHLRNGGHVAAVRSHELSRFFFRADLDDFFGRVNRSRVTRCLKPWFSYAEAREMASESVVKRPGETAFVLPYGFVQSPILASLALDKSKLGSLLRSLDGGRDFTVSVYVDDIIISGDDEAQLKEVASRLERVASEALFPLSSGKTQGPASGVTVFNIELSHRMLRITDDRLASLRLDYQATASERCKAGIVSYVYSVNPDQVAQVT

SEQ ID NO: 2320 - protein, 251 aa, synthetic construct
  source 1..251: note = MG160-4_T21S
VTQKWTHRYQLKPGRWVFAPSDEAKKCGAHIKRSVASRWKAPNFYYHLRNGGHVAAVRSHELSRFFFRADLDDFFGRVNRSRVTRCLKPWFSYAEAREMASESVVKRPGETAFVLPYGFVQSPILASLALDKSKLGSLLRSLDGGRDFTVSVYVDDIIISGDDEAQLKEVASRLERVASEALFPLSSGKTQGPASGVTVFNIELSHRMLRITDDRLASLRLDYQATASERCKAGIVSYVYSVNPDQVAQVT

SEQ ID NO: 2321 - protein, 251 aa, synthetic construct
  source 1..251: note = MG160-4_D22E
VTQKWTHRYQLKPGRWVFAPTEEAKKCGAHIKRSVASRWKAPNFYYHLRNGGHVAAVRSHELSRFFFRADLDDFFGRVNRSRVTRCLKPWFSYAEAREMASESVVKRPGETAFVLPYGFVQSPILASLALDKSKLGSLLRSLDGGRDFTVSVYVDDIIISGDDEAQLKEVASRLERVASEALFPLSSGKTQGPASGVTVFNIELSHRMLRITDDRLASLRLDYQATASERCKAGIVSYVYSVNPDQVAQVT

SEQ ID NO: 2322 - protein, 251 aa, synthetic construct
  source 1..251: note = MG160-4_D22P
VTQKWTHRYQLKPGRWVFAPTPEAKKCGAHIKRSVASRWKAPNFYYHLRNGGHVAAVRSHELSRFFFRADLDDFFGRVNRSRVTRCLKPWFSYAEAREMASESVVKRPGETAFVLPYGFVQSPILASLALDKSKLGSLLRSLDGGRDFTVSVYVDDIIISGDDEAQLKEVASRLERVASEALFPLSSGKTQGPASGVTVFNIELSHRMLRITDDRLASLRLDYQATASERCKAGIVSYVYSVNPDQVAQVT

SEQ ID NO: 2323 - protein, 251 aa, synthetic construct
  source 1..251: note = MG160-4_K25I
VTQKWTHRYQLKPGRWVFAPTDEAIKCGAHIKRSVASRWKAPNFYYHLRNGGHVAAVRSHELSRFFFRADLDDFFGRVNRSRVTRCLKPWFSYAEAREMASESVVKRPGETAFVLPYGFVQSPILASLALDKSKLGSLLRSLDGGRDFTVSVYVDDIIISGDDEAQLKEVASRLERVASEALFPLSSGKTQGPASGVTVFNIELSHRMLRITDDRLASLRLDYQATASERCKAGIVSYVYSVNPDQVAQVT

SEQ ID NO: 2324 - protein, 251 aa, synthetic construct
  source 1..251: note = MG160-4_K26Q
VTQKWTHRYQLKPGRWVFAPTDEAKQCGAHIKRSVASRWKAPNFYYHLRNGGHVAAVRSHELSRFFFRADLDDFFGRVNRSRVTRCLKPWFSYAEAREMASESVVKRPGETAFVLPYGFVQSPILASLALDKSKLGSLLRSLDGGRDFTVSVYVDDIIISGDDEAQLKEVASRLERVASEALFPLSSGKTQGPASGVTVFNIELSHRMLRITDDRLASLRLDYQATASERCKAGIVSYVYSVNPDQVAQVT

SEQ ID NO: 2325 - protein, 251 aa, synthetic construct
  source 1..251: note = MG160-4_C27H
VTQKWTHRYQLKPGRWVFAPTDEAKKHGAHIKRSVASRWKAPNFYYHLRNGGHVAAVRSHELSRFFFRADLDDFFGRVNRSRVTRCLKPWFSYAEAREMASESVVKRPGETAFVLPYGFVQSPILASLALDKSKLGSLLRSLDGGRDFTVSVYVDDIIISGDDEAQLKEVASRLERVASEALFPLSSGKTQGPASGVTVFNIELSHRMLRITDDRLASLRLDYQATASERCKAGIVSYVYSVNPDQVAQVT

SEQ ID NO: 2326 - protein, 251 aa, synthetic construct
  source 1..251: note = MG160-4_C27Y
VTQKWTHRYQLKPGRWVFAPTDEAKKYGAHIKRSVASRWKAPNFYYHLRNGGHVAAVRSHELSRFFFRADLDDFFGRVNRSRVTRCLKPWFSYAEAREMASESVVKRPGETAFVLPYGFVQSPILASLALDKSKLGSLLRSLDGGRDFTVSVYVDDIIISGDDEAQLKEVASRLERVASEALFPLSSGKTQGPASGVTVFNIELSHRMLRITDDRLASLRLDYQATASERCKAGIVSYVYSVNPDQVAQVT

SEQ ID NO: 2327 - protein, 251 aa, synthetic construct
  source 1..251: note = MG160-4_A29R
VTQKWTHRYQLKPGRWVFAPTDEAKKCGRHIKRSVASRWKAPNFYYHLRNGGHVAAVRSHELSRFFFRADLDDFFGRVNRSRVTRCLKPWFSYAEAREMASESVVKRPGETAFVLPYGFVQSPILASLALDKSKLGSLLRSLDGGRDFTVSVYVDDIIISGDDEAQLKEVASRLERVASEALFPLSSGKTQGPASGVTVFNIELSHRMLRITDDRLASLRLDYQATASERCKAGIVSYVYSVNPDQVAQVT

SEQ ID NO: 2328 - protein, 251 aa, synthetic construct
  source 1..251: note = MG160-4_A29E
VTQKWTHRYQLKPGRWVFAPTDEAKKCGEHIKRSVASRWKAPNFYYHLRNGGHVAAVRSHELSRFFFRADLDDFFGRVNRSRVTRCLKPWFSYAEAREMASESVVKRPGETAFVLPYGFVQSPILASLALDKSKLGSLLRSLDGGRDFTVSVYVDDIIISGDDEAQLKEVASRLERVASEALFPLSSGKTQGPASGVTVFNIELSHRMLRITDDRLASLRLDYQATASERCKAGIVSYVYSVNPDQVAQVT

SEQ ID NO: 2329 - protein, 251 aa, synthetic construct
  source 1..251: note = MG160-4_H30K
VTQKWTHRYQLKPGRWVFAPTDEAKKCGAKIKRSVASRWKAPNFYYHLRNGGHVAAVRSHELSRFFFRADLDDFFGRVNRSRVTRCLKPWFSYAEAREMASESVVKRPGETAFVLPYGFVQSPILASLALDKSKLGSLLRSLDGGRDFTVSVYVDDIIISGDDEAQLKEVASRLERVASEALFPLSSGKTQGPASGVTVFNIELSHRMLRITDDRLASLRLDYQATASERCKAGIVSYVYSVNPDQVAQVT

SEQ ID NO: 2330 - protein, 251 aa, synthetic construct
  source 1..251: note = MG160-4_S34Q
VTQKWTHRYQLKPGRWVFAPTDEAKKCGAHIKRQVASRWKAPNFYYHLRNGGHVAAVRSHELSRFFFRADLDDFFGRVNRSRVTRCLKPWFSYAEAREMASESVVKRPGETAFVLPYGFVQSPILASLALDKSKLGSLLRSLDGGRDFTVSVYVDDIIISGDDEAQLKEVASRLERVASEALFPLSSGKTQGPASGVTVFNIELSHRMLRITDDRLASLRLDYQATASERCKAGIVSYVYSVNPDQVAQVT

SEQ ID NO: 2331 - protein, 251 aa, synthetic construct
  source 1..251: note = MG160-4_K40N
VTQKWTHRYQLKPGRWVFAPTDEAKKCGAHIKRSVASRWNAPNFYYHLRNGGHVAAVRSHELSRFFFRADLDDFFGRVNRSRVTRCLKPWFSYAEAREMASESVVKRPGETAFVLPYGFVQSPILASLALDKSKLGSLLRSLDGGRDFTVSVYVDDIIISGDDEAQLKEVASRLERVASEALFPLSSGKTQGPASGVTVFNIELSHRMLRITDDRLASLRLDYQATASERCKAGIVSYVYSVNPDQVAQVT

SEQ ID NO: 2332 - protein, 251 aa, synthetic construct
  source 1..251: note = MG160-4_N43D
VTQKWTHRYQLKPGRWVFAPTDEAKKCGAHIKRSVASRWKAPDFYYHLRNGGHVAAVRSHELSRFFFRADLDDFFGRVNRSRVTRCLKPWFSYAEAREMASESVVKRPGETAFVLPYGFVQSPILASLALDKSKLGSLLRSLDGGRDFTVSVYVDDIIISGDDEAQLKEVASRLERVASEALFPLSSGKTQGPASGVTVFNIELSHRMLRITDDRLASLRLDYQATASERCKAGIVSYVYSVNPDQVAQVT

SEQ ID NO: 2333 - protein, 251 aa, synthetic construct
  source 1..251: note = MG160-4_N50D
VTQKWTHRYQLKPGRWVFAPTDEAKKCGAHIKRSVASRWKAPNFYYHLRDGGHVAAVRSHELSRFFFRADLDDFFGRVNRSRVTRCLKPWFSYAEAREMASESVVKRPGETAFVLPYGFVQSPILASLALDKSKLGSLLRSLDGGRDFTVSVYVDDIIISGDDEAQLKEVASRLERVASEALFPLSSGKTQGPASGVTVFNIELSHRMLRITDDRLASLRLDYQATASERCKAGIVSYVYSVNPDQVAQVT

SEQ ID NO: 2334 - protein, 251 aa, synthetic construct
  source 1..251: note = MG160-4_N50K
VTQKWTHRYQLKPGRWVFAPTDEAKKCGAHIKRSVASRWKAPNFYYHLRKGGHVAAVRSHELSRFFFRADLDDFFGRVNRSRVTRCLKPWFSYAEAREMASESVVKRPGETAFVLPYGFVQSPILASLALDKSKLGSLLRSLDGGRDFTVSVYVDDIIISGDDEAQLKEVASRLERVASEALFPLSSGKTQGPASGVTVFNIELSHRMLRITDDRLASLRLDYQATASERCKAGIVSYVYSVNPDQVAQVT

SEQ ID NO: 2335 - protein, 251 aa, synthetic construct
  source 1..251: note = MG160-4_N50R
VTQKWTHRYQLKPGRWVFAPTDEAKKCGAHIKRSVASRWKAPNFYYHLRRGGHVAAVRSHELSRFFFRADLDDFFGRVNRSRVTRCLKPWFSYAEAREMASESVVKRPGETAFVLPYGFVQSPILASLALDKSKLGSLLRSLDGGRDFTVSVYVDDIIISGDDEAQLKEVASRLERVASEALFPLSSGKTQGPASGVTVFNIELSHRMLRITDDRLASLRLDYQATASERCKAGIVSYVYSVNPDQVAQVT

SEQ ID NO: 2336 - protein, 251 aa, synthetic construct
  source 1..251: note = MG160-4_G52R
VTQKWTHRYQLKPGRWVFAPTDEAKKCGAHIKRSVASRWKAPNFYYHLRNGRHVAAVRSHELSRFFFRADLDDFFGRVNRSRVTRCLKPWFSYAEAREMASESVVKRPGETAFVLPYGFVQSPILASLALDKSKLGSLLRSLDGGRDFTVSVYVDDIIISGDDEAQLKEVASRLERVASEALFPLSSGKTQGPASGVTVFNIELSHRMLRITDDRLASLRLDYQATASERCKAGIVSYVYSVNPDQVAQVT

SEQ ID NO: 2337 - protein, 251 aa, synthetic construct
  source 1..251: note = MG160-4_H53R
VTQKWTHRYQLKPGRWVFAPTDEAKKCGAHIKRSVASRWKAPNFYYHLRNGGRVAAVRSHELSRFFFRADLDDFFGRVNRSRVTRCLKPWFSYAEAREMASESVVKRPGETAFVLPYGFVQSPILASLALDKSKLGSLLRSLDGGRDFTVSVYVDDIIISGDDEAQLKEVASRLERVASEALFPLSSGKTQGPASGVTVFNIELSHRMLRITDDRLASLRLDYQATASERCKAGIVSYVYSVNPDQVAQVT

SEQ ID NO: 2338 - protein, 251 aa, synthetic construct
  source 1..251: note = MG160-4_V57A
VTQKWTHRYQLKPGRWVFAPTDEAKKCGAHIKRSVASRWKAPNFYYHLRNGGHVAAARSHELSRFFFRADLDDFFGRVNRSRVTRCLKPWFSYAEAREMASESVVKRPGETAFVLPYGFVQSPILASLALDKSKLGSLLRSLDGGRDFTVSVYVDDIIISGDDEAQLKEVASRLERVASEALFPLSSGKTQGPASGVTVFNIELSHRMLRITDDRLASLRLDYQATASERCKAGIVSYVYSVNPDQVAQVT

SEQ ID NO: 2339 - protein, 251 aa, synthetic construct
  source 1..251: note = MG160-4_V57L
VTQKWTHRYQLKPGRWVFAPTDEAKKCGAHIKRSVASRWKAPNFYYHLRNGGHVAALRSHELSRFFFRADLDDFFGRVNRSRVTRCLKPWFSYAEAREMASESVVKRPGETAFVLPYGFVQSPILASLALDKSKLGSLLRSLDGGRDFTVSVYVDDIIISGDDEAQLKEVASRLERVASEALFPLSSGKTQGPASGVTVFNIELSHRMLRITDDRLASLRLDYQATASERCKAGIVSYVYSVNPDQVAQVT

SEQ ID NO: 2340 - protein, 251 aa, synthetic construct
  source 1..251: note = MG160-4_R58Q
VTQKWTHRYQLKPGRWVFAPTDEAKKCGAHIKRSVASRWKAPNFYYHLRNGGHVAAVQSHELSRFFFRADLDDFFGRVNRSRVTRCLKPWFSYAEAREMASESVVKRPGETAFVLPYGFVQSPILASLALDKSKLGSLLRSLDGGRDFTVSVYVDDIIISGDDEAQLKEVASRLERVASEALFPLSSGKTQGPASGVTVFNIELSHRMLRITDDRLASLRLDYQATASERCKAGIVSYVYSVNPDQVAQVT

SEQ ID NO: 2341 - protein, 251 aa, synthetic construct
  source 1..251: note = MG160-4_S59A
VTQKWTHRYQLKPGRWVFAPTDEAKKCGAHIKRSVASRWKAPNFYYHLRNGGHVAAVRAHELSRFFFRADLDDFFGRVNRSRVTRCLKPWFSYAEAREMASESVVKRPGETAFVLPYGFVQSPILASLALDKSKLGSLLRSLDGGRDFTVSVYVDDIIISGDDEAQLKEVASRLERVASEALFPLSSGKTQGPASGVTVFNIELSHRMLRITDDRLASLRLDYQATASERCKAGIVSYVYSVNPDQVAQVT

SEQ ID NO: 2342 - protein, 251 aa, synthetic construct
  source 1..251: note = MG160-4_S59L
VTQKWTHRYQLKPGRWVFAPTDEAKKCGAHIKRSVASRWKAPNFYYHLRNGGHVAAVRLHELSRFFFRADLDDFFGRVNRSRVTRCLKPWFSYAEAREMASESVVKRPGETAFVLPYGFVQSPILASLALDKSKLGSLLRSLDGGRDFTVSVYVDDIIISGDDEAQLKEVASRLERVASEALFPLSSGKTQGPASGVTVFNIELSHRMLRITDDRLASLRLDYQATASERCKAGIVSYVYSVNPDQVAQVT

SEQ ID NO: 2343 - protein, 251 aa, synthetic construct
  source 1..251: note = MG160-4_S59K
VTQKWTHRYQLKPGRWVFAPTDEAKKCGAHIKRSVASRWKAPNFYYHLRNGGHVAAVRKHELSRFFFRADLDDFFGRVNRSRVTRCLKPWFSYAEAREMASESVVKRPGETAFVLPYGFVQSPILASLALDKSKLGSLLRSLDGGRDFTVSVYVDDIIISGDDEAQLKEVASRLERVASEALFPLSSGKTQGPASGVTVFNIELSHRMLRITDDRLASLRLDYQATASERCKAGIVSYVYSVNPDQVAQVT

SEQ ID NO: 2344 - protein, 251 aa, synthetic construct
  source 1..251: note = MG160-4_E61L
VTQKWTHRYQLKPGRWVFAPTDEAKKCGAHIKRSVASRWKAPNFYYHLRNGGHVAAVRSHLLSRFFFRADLDDFFGRVNRSRVTRCLKPWFSYAEAREMASESVVKRPGETAFVLPYGFVQSPILASLALDKSKLGSLLRSLDGGRDFTVSVYVDDIIISGDDEAQLKEVASRLERVASEALFPLSSGKTQGPASGVTVFNIELSHRMLRITDDRLASLRLDYQATASERCKAGIVSYVYSVNPDQVAQVT

SEQ ID NO: 2345 - protein, 251 aa, synthetic construct
  source 1..251: note = MG160-4_F67H
VTQKWTHRYQLKPGRWVFAPTDEAKKCGAHIKRSVASRWKAPNFYYHLRNGGHVAAVRSHELSRFFHRADLDDFFGRVNRSRVTRCLKPWFSYAEAREMASESVVKRPGETAFVLPYGFVQSPILASLALDKSKLGSLLRSLDGGRDFTVSVYVDDIIISGDDEAQLKEVASRLERVASEALFPLSSGKTQGPASGVTVFNIELSHRMLRITDDRLASLRLDYQATASERCKAGIVSYVYSVNPDQVAQVT

SEQ ID NO: 2346 - protein, 251 aa, synthetic construct
  source 1..251: note = MG160-4_R68H
VTQKWTHRYQLKPGRWVFAPTDEAKKCGAHIKRSVASRWKAPNFYYHLRNGGHVAAVRSHELSRFFFHADLDDFFGRVNRSRVTRCLKPWFSYAEAREMASESVVKRPGETAFVLPYGFVQSPILASLALDKSKLGSLLRSLDGGRDFTVSVYVDDIIISGDDEAQLKEVASRLERVASEALFPLSSGKTQGPASGVTVFNIELSHRMLRITDDRLASLRLDYQATASERCKAGIVSYVYSVNPDQVAQVT

SEQ ID NO: 2347 - protein, 251 aa, synthetic construct
  source 1..251: note = MG160-4_A69S
VTQKWTHRYQLKPGRWVFAPTDEAKKCGAHIKRSVASRWKAPNFYYHLRNGGHVAAVRSHELSRFFFRSDLDDFFGRVNRSRVTRCLKPWFSYAEAREMASESVVKRPGETAFVLPYGFVQSPILASLALDKSKLGSLLRSLDGGRDFTVSVYVDDIIISGDDEAQLKEVASRLERVASEALFPLSSGKTQGPASGVTVFNIELSHRMLRITDDRLASLRLDYQATASERCKAGIVSYVYSVNPDQVAQVT

SEQ ID NO: 2348 - protein, 251 aa, synthetic construct
  source 1..251: note = MG160-4_A69V
VTQKWTHRYQLKPGRWVFAPTDEAKKCGAHIKRSVASRWKAPNFYYHLRNGGHVAAVRSHELSRFFFRVDLDDFFGRVNRSRVTRCLKPWFSYAEAREMASESVVKRPGETAFVLPYGFVQSPILASLALDKSKLGSLLRSLDGGRDFTVSVYVDDIIISGDDEAQLKEVASRLERVASEALFPLSSGKTQGPASGVTVFNIELSHRMLRITDDRLASLRLDYQATASERCKAGIVSYVYSVNPDQVAQVT

SEQ ID NO: 2349 - protein, 251 aa, synthetic construct
  source 1..251: note = MG160-4_D72K
VTQKWTHRYQLKPGRWVFAPTDEAKKCGAHIKRSVASRWKAPNFYYHLRNGGHVAAVRSHELSRFFFRADLKDFFGRVNRSRVTRCLKPWFSYAEAREMASESVVKRPGETAFVLPYGFVQSPILASLALDKSKLGSLLRSLDGGRDFTVSVYVDDIIISGDDEAQLKEVASRLERVASEALFPLSSGKTQGPASGVTVFNIELSHRMLRITDDRLASLRLDYQATASERCKAGIVSYVYSVNPDQVAQVT

SEQ ID NO: 2350 - protein, 251 aa, synthetic construct
  source 1..251: note = MG160-4_F75R
VTQKWTHRYQLKPGRWVFAPTDEAKKCGAHIKRSVASRWKAPNFYYHLRNGGHVAAVRSHELSRFFFRADLDDFRGRVNRSRVTRCLKPWFSYAEAREMASESVVKRPGETAFVLPYGFVQSPILASLALDKSKLGSLLRSLDGGRDFTVSVYVDDIIISGDDEAQLKEVASRLERVASEALFPLSSGKTQGPASGVTVFNIELSHRMLRITDDRLASLRLDYQATASERCKAGIVSYVYSVNPDQVAQVT

SEQ ID NO: 2351 - protein, 251 aa, synthetic construct
  source 1..251: note = MG160-4_C86S
VTQKWTHRYQLKPGRWVFAPTDEAKKCGAHIKRSVASRWKAPNFYYHLRNGGHVAAVRSHELSRFFFRADLDDFFGRVNRSRVTRSLKPWFSYAEAREMASESVVKRPGETAFVLPYGFVQSPILASLALDKSKLGSLLRSLDGGRDFTVSVYVDDIIISGDDEAQLKEVASRLERVASEALFPLSSGKTQGPASGVTVFNIELSHRMLRITDDRLASLRLDYQATASERCKAGIVSYVYSVNPDQVAQVT

SEQ ID NO: 2352 - protein, 251 aa, synthetic construct
  source 1..251: note = MG160-4_P89R
VTQKWTHRYQLKPGRWVFAPTDEAKKCGAHIKRSVASRWKAPNFYYHLRNGGHVAAVRSHELSRFFFRADLDDFFGRVNRSRVTRCLKRWFSYAEAREMASESVVKRPGETAFVLPYGFVQSPILASLALDKSKLGSLLRSLDGGRDFTVSVYVDDIIISGDDEAQLKEVASRLERVASEALFPLSSGKTQGPASGVTVFNIELSHRMLRITDDRLASLRLDYQATASERCKAGIVSYVYSVNPDQVAQVT

SEQ ID NO: 2353 - protein, 251 aa, synthetic construct
  source 1..251: note = MG160-4_A94R
VTQKWTHRYQLKPGRWVFAPTDEAKKCGAHIKRSVASRWKAPNFYYHLRNGGHVAAVRSHELSRFFFRADLDDFFGRVNRSRVTRCLKPWFSYREAREMASESVVKRPGETAFVLPYGFVQSPILASLALDKSKLGSLLRSLDGGRDFTVSVYVDDIIISGDDEAQLKEVASRLERVASEALFPLSSGKTQGPASGVTVFNIELSHRMLRITDDRLASLRLDYQATASERCKAGIVSYVYSVNPDQVAQVT

SEQ ID NO: 2354 - protein, 251 aa, synthetic construct
  source 1..251: note = MG160-4_E95Q
VTQKWTHRYQLKPGRWVFAPTDEAKKCGAHIKRSVASRWKAPNFYYHLRNGGHVAAVRSHELSRFFFRADLDDFFGRVNRSRVTRCLKPWFSYAQAREMASESVVKRPGETAFVLPYGFVQSPILASLALDKSKLGSLLRSLDGGRDFTVSVYVDDIIISGDDEAQLKEVASRLERVASEALFPLSSGKTQGPASGVTVFNIELSHRMLRITDDRLASLRLDYQATASERCKAGIVSYVYSVNPDQVAQVT

SEQ ID NO: 2355 - protein, 251 aa, synthetic construct
  source 1..251: note = MG160-4_E102Q
VTQKWTHRYQLKPGRWVFAPTDEAKKCGAHIKRSVASRWKAPNFYYHLRNGGHVAAVRSHELSRFFFRADLDDFFGRVNRSRVTRCLKPWFSYAEAREMASQSVVKRPGETAFVLPYGFVQSPILASLALDKSKLGSLLRSLDGGRDFTVSVYVDDIIISGDDEAQLKEVASRLERVASEALFPLSSGKTQGPASGVTVFNIELSHRMLRITDDRLASLRLDYQATASERCKAGIVSYVYSVNPDQVAQVT

SEQ ID NO: 2356 - protein, 251 aa, synthetic construct
  source 1..251: note = MG160-4_V104T
VTQKWTHRYQLKPGRWVFAPTDEAKKCGAHIKRSVASRWKAPNFYYHLRNGGHVAAVRSHELSRFFFRADLDDFFGRVNRSRVTRCLKPWFSYAEAREMASESTVKRPGETAFVLPYGFVQSPILASLALDKSKLGSLLRSLDGGRDFTVSVYVDDIIISGDDEAQLKEVASRLERVASEALFPLSSGKTQGPASGVTVFNIELSHRMLRITDDRLASLRLDYQATASERCKAGIVSYVYSVNPDQVAQVT

SEQ ID NO: 2357 - protein, 251 aa, synthetic construct
  source 1..251: note = MG160-4_R107H
VTQKWTHRYQLKPGRWVFAPTDEAKKCGAHIKRSVASRWKAPNFYYHLRNGGHVAAVRSHELSRFFFRADLDDFFGRVNRSRVTRCLKPWFSYAEAREMASESVVKHPGETAFVLPYGFVQSPILASLALDKSKLGSLLRSLDGGRDFTVSVYVDDIIISGDDEAQLKEVASRLERVASEALFPLSSGKTQGPASGVTVFNIELSHRMLRITDDRLASLRLDYQATASERCKAGIVSYVYSVNPDQVAQVT

SEQ ID NO: 2358 - protein, 251 aa, synthetic construct
  source 1..251: note = MG160-4_E110N
VTQKWTHRYQLKPGRWVFAPTDEAKKCGAHIKRSVASRWKAPNFYYHLRNGGHVAAVRSHELSRFFFRADLDDFFGRVNRSRVTRCLKPWFSYAEAREMASESVVKRPGNTAFVLPYGFVQSPILASLALDKSKLGSLLRSLDGGRDFTVSVYVDDIIISGDDEAQLKEVASRLERVASEALFPLSSGKTQGPASGVTVFNIELSHRMLRITDDRLASLRLDYQATASERCKAGIVSYVYSVNPDQVAQVT

SEQ ID NO: 2359 - protein, 251 aa, synthetic construct
  source 1..251: note = MG160-4_T111K
VTQKWTHRYQLKPGRWVFAPTDEAKKCGAHIKRSVASRWKAPNFYYHLRNGGHVAAVRSHELSRFFFRADLDDFFGRVNRSRVTRCLKPWFSYAEAREMASESVVKRPGEKAFVLPYGFVQSPILASLALDKSKLGSLLRSLDGGRDFTVSVYVDDIIISGDDEAQLKEVASRLERVASEALFPLSSGKTQGPASGVTVFNIELSHRMLRITDDRLASLRLDYQATASERCKAGIVSYVYSVNPDQVAQVT

SEQ ID NO: 2360 - protein, 251 aa, synthetic construct
  source 1..251: note = MG160-4_Y117F
VTQKWTHRYQLKPGRWVFAPTDEAKKCGAHIKRSVASRWKAPNFYYHLRNGGHVAAVRSHELSRFFFRADLDDFFGRVNRSRVTRCLKPWFSYAEAREMASESVVKRPGETAFVLPFGFVQSPILASLALDKSKLGSLLRSLDGGRDFTVSVYVDDIIISGDDEAQLKEVASRLERVASEALFPLSSGKTQGPASGVTVFNIELSHRMLRITDDRLASLRLDYQATASERCKAGIVSYVYSVNPDQVAQVT

SEQ ID NO: 2361 - protein, 251 aa, synthetic construct
  source 1..251: note = MG160-4_Y117R
VTQKWTHRYQLKPGRWVFAPTDEAKKCGAHIKRSVASRWKAPNFYYHLRNGGHVAAVRSHELSRFFFRADLDDFFGRVNRSRVTRCLKPWFSYAEAREMASESVVKRPGETAFVLPRGFVQSPILASLALDKSKLGSLLRSLDGGRDFTVSVYVDDIIISGDDEAQLKEVASRLERVASEALFPLSSGKTQGPASGVTVFNIELSHRMLRITDDRLASLRLDYQATASERCKAGIVSYVYSVNPDQVAQVT

SEQ ID NO: 2362 - protein, 251 aa, synthetic construct
  source 1..251: note = MG160-4_G118R
VTQKWTHRYQLKPGRWVFAPTDEAKKCGAHIKRSVASRWKAPNFYYHLRNGGHVAAVRSHELSRFFFRADLDDFFGRVNRSRVTRCLKPWFSYAEAREMASESVVKRPGETAFVLPYRFVQSPILASLALDKSKLGSLLRSLDGGRDFTVSVYVDDIIISGDDEAQLKEVASRLERVASEALFPLSSGKTQGPASGVTVFNIELSHRMLRITDDRLASLRLDYQATASERCKAGIVSYVYSVNPDQVAQVT

SEQ ID NO: 2363 - protein, 251 aa, synthetic construct
  source 1..251: note = MG160-4_V120P
VTQKWTHRYQLKPGRWVFAPTDEAKKCGAHIKRSVASRWKAPNFYYHLRNGGHVAAVRSHELSRFFFRADLDDFFGRVNRSRVTRCLKPWFSYAEAREMASESVVKRPGETAFVLPYGFPQSPILASLALDKSKLGSLLRSLDGGRDFTVSVYVDDIIISGDDEAQLKEVASRLERVASEALFPLSSGKTQGPASGVTVFNIELSHRMLRITDDRLASLRLDYQATASERCKAGIVSYVYSVNPDQVAQVT

SEQ ID NO: 2364 - protein, 251 aa, synthetic construct
  source 1..251: note = MG160-4_V120I
VTQKWTHRYQLKPGRWVFAPTDEAKKCGAHIKRSVASRWKAPNFYYHLRNGGHVAAVRSHELSRFFFRADLDDFFGRVNRSRVTRCLKPWFSYAEAREMASESVVKRPGETAFVLPYGFIQSPILASLALDKSKLGSLLRSLDGGRDFTVSVYVDDIIISGDDEAQLKEVASRLERVASEALFPLSSGKTQGPASGVTVFNIELSHRMLRITDDRLASLRLDYQATASERCKAGIVSYVYSVNPDQVAQVT

SEQ ID NO: 2365 - protein, 251 aa, synthetic construct
  source 1..251: note = MG160-4_S122R
VTQKWTHRYQLKPGRWVFAPTDEAKKCGAHIKRSVASRWKAPNFYYHLRNGGHVAAVRSHELSRFFFRADLDDFFGRVNRSRVTRCLKPWFSYAEAREMASESVVKRPGETAFVLPYGFVQRPILASLALDKSKLGSLLRSLDGGRDFTVSVYVDDIIISGDDEAQLKEVASRLERVASEALFPLSSGKTQGPASGVTVFNIELSHRMLRITDDRLASLRLDYQATASERCKAGIVSYVYSVNPDQVAQVT

SEQ ID NO: 2366 - protein, 251 aa, synthetic construct
  source 1..251: note = MG160-4_P123Q
VTQKWTHRYQLKPGRWVFAPTDEAKKCGAHIKRSVASRWKAPNFYYHLRNGGHVAAVRSHELSRFFFRADLDDFFGRVNRSRVTRCLKPWFSYAEAREMASESVVKRPGETAFVLPYGFVQSQILASLALDKSKLGSLLRSLDGGRDFTVSVYVDDIIISGDDEAQLKEVASRLERVASEALFPLSSGKTQGPASGVTVFNIELSHRMLRITDDRLASLRLDYQATASERCKAGIVSYVYSVNPDQVAQVT

SEQ ID NO: 2367 - protein, 251 aa, synthetic construct
  source 1..251: note = MG160-4_P123R
VTQKWTHRYQLKPGRWVFAPTDEAKKCGAHIKRSVASRWKAPNFYYHLRNGGHVAAVRSHELSRFFFRADLDDFFGRVNRSRVTRCLKPWFSYAEAREMASESVVKRPGETAFVLPYGFVQSRILASLALDKSKLGSLLRSLDGGRDFTVSVYVDDIIISGDDEAQLKEVASRLERVASEALFPLSSGKTQGPASGVTVFNIELSHRMLRITDDRLASLRLDYQATASERCKAGIVSYVYSVNPDQVAQVT

SEQ ID NO: 2368 - protein, 251 aa, synthetic construct
  source 1..251: note = MG160-4_S127C
VTQKWTHRYQLKPGRWVFAPTDEAKKCGAHIKRSVASRWKAPNFYYHLRNGGHVAAVRSHELSRFFFRADLDDFFGRVNRSRVTRCLKPWFSYAEAREMASESVVKRPGETAFVLPYGFVQSPILACLALDKSKLGSLLRSLDGGRDFTVSVYVDDIIISGDDEAQLKEVASRLERVASEALFPLSSGKTQGPASGVTVFNIELSHRMLRITDDRLASLRLDYQATASERCKAGIVSYVYSVNPDQVAQVT

SEQ ID NO: 2369 - protein, 251 aa, synthetic construct
  source 1..251: note = MG160-4_K132Q
VTQKWTHRYQLKPGRWVFAPTDEAKKCGAHIKRSVASRWKAPNFYYHLRNGGHVAAVRSHELSRFFFRADLDDFFGRVNRSRVTRCLKPWFSYAEAREMASESVVKRPGETAFVLPYGFVQSPILASLALDQSKLGSLLRSLDGGRDFTVSVYVDDIIISGDDEAQLKEVASRLERVASEALFPLSSGKTQGPASGVTVFNIELSHRMLRITDDRLASLRLDYQATASERCKAGIVSYVYSVNPDQVAQVT

SEQ ID NO: 2370 - protein, 251 aa, synthetic construct
  source 1..251: note = MG160-4_S137R
VTQKWTHRYQLKPGRWVFAPTDEAKKCGAHIKRSVASRWKAPNFYYHLRNGGHVAAVRSHELSRFFFRADLDDFFGRVNRSRVTRCLKPWFSYAEAREMASESVVKRPGETAFVLPYGFVQSPILASLALDKSKLGRLLRSLDGGRDFTVSVYVDDIIISGDDEAQLKEVASRLERVASEALFPLSSGKTQGPASGVTVFNIELSHRMLRITDDRLASLRLDYQATASERCKAGIVSYVYSVNPDQVAQVT

SEQ ID NO: 2371 - protein, 251 aa, synthetic construct
  source 1..251: note = MG160-4_L138Y
VTQKWTHRYQLKPGRWVFAPTDEAKKCGAHIKRSVASRWKAPNFYYHLRNGGHVAAVRSHELSRFFFRADLDDFFGRVNRSRVTRCLKPWFSYAEAREMASESVVKRPGETAFVLPYGFVQSPILASLALDKSKLGSYLRSLDGGRDFTVSVYVDDIIISGDDEAQLKEVASRLERVASEALFPLSSGKTQGPASGVTVFNIELSHRMLRITDDRLASLRLDYQATASERCKAGIVSYVYSVNPDQVAQVT

SEQ ID NO: 2372 - protein, 251 aa, synthetic construct
  source 1..251: note = MG160-4_R140H
VTQKWTHRYQLKPGRWVFAPTDEAKKCGAHIKRSVASRWKAPNFYYHLRNGGHVAAVRSHELSRFFFRADLDDFFGRVNRSRVTRCLKPWFSYAEAREMASESVVKRPGETAFVLPYGFVQSPILASLALDKSKLGSLLHSLDGGRDFTVSVYVDDIIISGDDEAQLKEVASRLERVASEALFPLSSGKTQGPASGVTVFNIELSHRMLRITDDRLASLRLDYQATASERCKAGIVSYVYSVNPDQVAQVT

SEQ ID NO: 2373 - protein, 251 aa, synthetic construct
  source 1..251: note = MG160-4_D143N
VTQKWTHRYQLKPGRWVFAPTDEAKKCGAHIKRSVASRWKAPNFYYHLRNGGHVAAVRSHELSRFFFRADLDDFFGRVNRSRVTRCLKPWFSYAEAREMASESVVKRPGETAFVLPYGFVQSPILASLALDKSKLGSLLRSLNGGRDFTVSVYVDDIIISGDDEAQLKEVASRLERVASEALFPLSSGKTQGPASGVTVFNIELSHRMLRITDDRLASLRLDYQATASERCKAGIVSYVYSVNPDQVAQVT

SEQ ID NO: 2374 - protein, 251 aa, synthetic construct
  source 1..251: note = MG160-4_G145N
VTQKWTHRYQLKPGRWVFAPTDEAKKCGAHIKRSVASRWKAPNFYYHLRNGGHVAAVRSHELSRFFFRADLDDFFGRVNRSRVTRCLKPWFSYAEAREMASESVVKRPGETAFVLPYGFVQSPILASLALDKSKLGSLLRSLDGNRDFTVSVYVDDIIISGDDEAQLKEVASRLERVASEALFPLSSGKTQGPASGVTVFNIELSHRMLRITDDRLASLRLDYQATASERCKAGIVSYVYSVNPDQVAQVT

SEQ ID NO: 2375 - protein, 251 aa, synthetic construct
  source 1..251: note = MG160-4_V154R
VTQKWTHRYQLKPGRWVFAPTDEAKKCGAHIKRSVASRWKAPNFYYHLRNGGHVAAVRSHELSRFFFRADLDDFFGRVNRSRVTRCLKPWFSYAEAREMASESVVKRPGETAFVLPYGFVQSPILASLALDKSKLGSLLRSLDGGRDFTVSVYRDDIIISGDDEAQLKEVASRLERVASEALFPLSSGKTQGPASGVTVFNIELSHRMLRITDDRLASLRLDYQATASERCKAGIVSYVYSVNPDQVAQVT

SEQ ID NO: 2376 - protein, 251 aa, synthetic construct
  source 1..251: note = MG160-4_V154M
VTQKWTHRYQLKPGRWVFAPTDEAKKCGAHIKRSVASRWKAPNFYYHLRNGGHVAAVRSHELSRFFFRADLDDFFGRVNRSRVTRCLKPWFSYAEAREMASESVVKRPGETAFVLPYGFVQSPILASLALDKSKLGSLLRSLDGGRDFTVSVYMDDIIISGDDEAQLKEVASRLERVASEALFPLSSGKTQGPASGVTVFNIELSHRMLRITDDRLASLRLDYQATASERCKAGIVSYVYSVNPDQVAQVT

SEQ ID NO: 2377 - protein, 251 aa, synthetic construct
  source 1..251: note = MG160-4_V154Y
VTQKWTHRYQLKPGRWVFAPTDEAKKCGAHIKRSVASRWKAPNFYYHLRNGGHVAAVRSHELSRFFFRADLDDFFGRVNRSRVTRCLKPWFSYAEAREMASESVVKRPGETAFVLPYGFVQSPILASLALDKSKLGSLLRSLDGGRDFTVSVYYDDIIISGDDEAQLKEVASRLERVASEALFPLSSGKTQGPASGVTVFNIELSHRMLRITDDRLASLRLDYQATASERCKAGIVSYVYSVNPDQVAQVT

SEQ ID NO: 2378 - protein, 251 aa, synthetic construct
  source 1..251: note = MG160-4_V154I
VTQKWTHRYQLKPGRWVFAPTDEAKKCGAHIKRSVASRWKAPNFYYHLRNGGHVAAVRSHELSRFFFRADLDDFFGRVNRSRVTRCLKPWFSYAEAREMASESVVKRPGETAFVLPYGFVQSPILASLALDKSKLGSLLRSLDGGRDFTVSVYIDDIIISGDDEAQLKEVASRLERVASEALFPLSSGKTQGPASGVTVFNIELSHRMLRITDDRLASLRLDYQATASERCKAGIVSYVYSVNPDQVAQVT

SEQ ID NO: 2379 - protein, 251 aa, synthetic construct
  source 1..251: note = MG160-4_D155R
VTQKWTHRYQLKPGRWVFAPTDEAKKCGAHIKRSVASRWKAPNFYYHLRNGGHVAAVRSHELSRFFFRADLDDFFGRVNRSRVTRCLKPWFSYAEAREMASESVVKRPGETAFVLPYGFVQSPILASLALDKSKLGSLLRSLDGGRDFTVSVYVRDIIISGDDEAQLKEVASRLERVASEALFPLSSGKTQGPASGVTVFNIELSHRMLRITDDRLASLRLDYQATASERCKAGIVSYVYSVNPDQVAQVT

SEQ ID NO: 2380 - protein, 251 aa, synthetic construct
  source 1..251: note = MG160-4_D156R
VTQKWTHRYQLKPGRWVFAPTDEAKKCGAHIKRSVASRWKAPNFYYHLRNGGHVAAVRSHELSRFFFRADLDDFFGRVNRSRVTRCLKPWFSYAEAREMASESVVKRPGETAFVLPYGFVQSPILASLALDKSKLGSLLRSLDGGRDFTVSVYVDRIIISGDDEAQLKEVASRLERVASEALFPLSSGKTQGPASGVTVFNIELSHRMLRITDDRLASLRLDYQATASERCKAGIVSYVYSVNPDQVAQVT

SEQ ID NO: 2381 - protein, 251 aa, synthetic construct
  source 1..251: note = MG160-4_E164Q
VTQKWTHRYQLKPGRWVFAPTDEAKKCGAHIKRSVASRWKAPNFYYHLRNGGHVAAVRSHELSRFFFRADLDDFFGRVNRSRVTRCLKPWFSYAEAREMASESVVKRPGETAFVLPYGFVQSPILASLALDKSKLGSLLRSLDGGRDFTVSVYVDDIIISGDDQAQLKEVASRLERVASEALFPLSSGKTQGPASGVTVFNIELSHRMLRITDDRLASLRLDYQATASERCKAGIVSYVYSVNPDQVAQVT

SEQ ID NO: 2382 - protein, 251 aa, synthetic construct
  source 1..251: note = MG160-4_A165E
VTQKWTHRYQLKPGRWVFAPTDEAKKCGAHIKRSVASRWKAPNFYYHLRNGGHVAAVRSHELSRFFFRADLDDFFGRVNRSRVTRCLKPWFSYAEAREMASESVVKRPGETAFVLPYGFVQSPILASLALDKSKLGSLLRSLDGGRDFTVSVYVDDIIISGDDEEQLKEVASRLERVASEALFPLSSGKTQGPASGVTVFNIELSHRMLRITDDRLASLRLDYQATASERCKAGIVSYVYSVNPDQVAQVT

SEQ ID NO: 2383 - protein, 251 aa, synthetic construct
  source 1..251: note = MG160-4_Q166L
VTQKWTHRYQLKPGRWVFAPTDEAKKCGAHIKRSVASRWKAPNFYYHLRNGGHVAAVRSHELSRFFFRADLDDFFGRVNRSRVTRCLKPWFSYAEAREMASESVVKRPGETAFVLPYGFVQSPILASLALDKSKLGSLLRSLDGGRDFTVSVYVDDIIISGDDEALLKEVASRLERVASEALFPLSSGKTQGPASGVTVFNIELSHRMLRITDDRLASLRLDYQATASERCKAGIVSYVYSVNPDQVAQVT

SEQ ID NO: 2384 - protein, 251 aa, synthetic construct
  source 1..251: note = MG160-4_K168Q
VTQKWTHRYQLKPGRWVFAPTDEAKKCGAHIKRSVASRWKAPNFYYHLRNGGHVAAVRSHELSRFFFRADLDDFFGRVNRSRVTRCLKPWFSYAEAREMASESVVKRPGETAFVLPYGFVQSPILASLALDKSKLGSLLRSLDGGRDFTVSVYVDDIIISGDDEAQLQEVASRLERVASEALFPLSSGKTQGPASGVTVFNIELSHRMLRITDDRLASLRLDYQATASERCKAGIVSYVYSVNPDQVAQVT

SEQ ID NO: 2385 - protein, 251 aa, synthetic construct
  source 1..251: note = MG160-4_E169Q
VTQKWTHRYQLKPGRWVFAPTDEAKKCGAHIKRSVASRWKAPNFYYHLRNGGHVAAVRSHELSRFFFRADLDDFFGRVNRSRVTRCLKPWFSYAEAREMASESVVKRPGETAFVLPYGFVQSPILASLALDKSKLGSLLRSLDGGRDFTVSVYVDDIIISGDDEAQLKQVASRLERVASEALFPLSSGKTQGPASGVTVFNIELSHRMLRITDDRLASLRLDYQATASERCKAGIVSYVYSVNPDQVAQVT

SEQ ID NO: 2386 - protein, 251 aa, synthetic construct
  source 1..251: note = MG160-4_E169R
VTQKWTHRYQLKPGRWVFAPTDEAKKCGAHIKRSVASRWKAPNFYYHLRNGGHVAAVRSHELSRFFFRADLDDFFGRVNRSRVTRCLKPWFSYAEAREMASESVVKRPGETAFVLPYGFVQSPILASLALDKSKLGSLLRSLDGGRDFTVSVYVDDIIISGDDEAQLKRVASRLERVASEALFPLSSGKTQGPASGVTVFNIELSHRMLRITDDRLASLRLDYQATASERCKAGIVSYVYSVNPDQVAQVT

SEQ ID NO: 2387 - protein, 251 aa, synthetic construct
  source 1..251: note = MG160-4_V170A
VTQKWTHRYQLKPGRWVFAPTDEAKKCGAHIKRSVASRWKAPNFYYHLRNGGHVAAVRSHELSRFFFRADLDDFFGRVNRSRVTRCLKPWFSYAEAREMASESVVKRPGETAFVLPYGFVQSPILASLALDKSKLGSLLRSLDGGRDFTVSVYVDDIIISGDDEAQLKEAASRLERVASEALFPLSSGKTQGPASGVTVFNIELSHRMLRITDDRLASLRLDYQATASERCKAGIVSYVYSVNPDQVAQVT

SEQ ID NO: 2388 - protein, 251 aa, synthetic construct
  source 1..251: note = MG160-4_A171L
VTQKWTHRYQLKPGRWVFAPTDEAKKCGAHIKRSVASRWKAPNFYYHLRNGGHVAAVRSHELSRFFFRADLDDFFGRVNRSRVTRCLKPWFSYAEAREMASESVVKRPGETAFVLPYGFVQSPILASLALDKSKLGSLLRSLDGGRDFTVSVYVDDIIISGDDEAQLKEVLSRLERVASEALFPLSSGKTQGPASGVTVFNIELSHRMLRITDDRLASLRLDYQATASERCKAGIVSYVYSVNPDQVAQVT

SEQ ID NO: 2389 - protein, 251 aa, synthetic construct
  source 1..251: note = MG160-4_S172E
VTQKWTHRYQLKPGRWVFAPTDEAKKCGAHIKRSVASRWKAPNFYYHLRNGGHVAAVRSHELSRFFFRADLDDFFGRVNRSRVTRCLKPWFSYAEAREMASESVVKRPGETAFVLPYGFVQSPILASLALDKSKLGSLLRSLDGGRDFTVSVYVDDIIISGDDEAQLKEVAERLERVASEALFPLSSGKTQGPASGVTVFNIELSHRMLRITDDRLASLRLDYQATASERCKAGIVSYVYSVNPDQVAQVT

SEQ ID NO: 2390 - protein, 251 aa, synthetic construct
  source 1..251: note = MG160-4_R173E
VTQKWTHRYQLKPGRWVFAPTDEAKKCGAHIKRSVASRWKAPNFYYHLRNGGHVAAVRSHELSRFFFRADLDDFFGRVNRSRVTRCLKPWFSYAEAREMASESVVKRPGETAFVLPYGFVQSPILASLALDKSKLGSLLRSLDGGRDFTVSVYVDDIIISGDDEAQLKEVASELERVASEALFPLSSGKTQGPASGVTVFNIELSHRMLRITDDRLASLRLDYQATASERCKAGIVSYVYSVNPDQVAQVT

SEQ ID NO: 2391 - protein, 251 aa, synthetic construct
  source 1..251: note = MG160-4_R176T
VTQKWTHRYQLKPGRWVFAPTDEAKKCGAHIKRSVASRWKAPNFYYHLRNGGHVAAVRSHELSRFFFRADLDDFFGRVNRSRVTRCLKPWFSYAEAREMASESVVKRPGETAFVLPYGFVQSPILASLALDKSKLGSLLRSLDGGRDFTVSVYVDDIIISGDDEAQLKEVASRLETVASEALFPLSSGKTQGPASGVTVFNIELSHRMLRITDDRLASLRLDYQATASERCKAGIVSYVYSVNPDQVAQVT

SEQ ID NO: 2392 - protein, 251 aa, synthetic construct
  source 1..251: note = MG160-4_V177R
VTQKWTHRYQLKPGRWVFAPTDEAKKCGAHIKRSVASRWKAPNFYYHLRNGGHVAAVRSHELSRFFFRADLDDFFGRVNRSRVTRCLKPWFSYAEAREMASESVVKRPGETAFVLPYGFVQSPILASLALDKSKLGSLLRSLDGGRDFTVSVYVDDIIISGDDEAQLKEVASRLERRASEALFPLSSGKTQGPASGVTVFNIELSHRMLRITDDRLASLRLDYQATASERCKAGIVSYVYSVNPDQVAQVT

SEQ ID NO: 2393 - protein, 251 aa, synthetic construct
  source 1..251: note = MG160-4_L185I
VTQKWTHRYQLKPGRWVFAPTDEAKKCGAHIKRSVASRWKAPNFYYHLRNGGHVAAVRSHELSRFFFRADLDDFFGRVNRSRVTRCLKPWFSYAEAREMASESVVKRPGETAFVLPYGFVQSPILASLALDKSKLGSLLRSLDGGRDFTVSVYVDDIIISGDDEAQLKEVASRLERVASEALFPISSGKTQGPASGVTVFNIELSHRMLRITDDRLASLRLDYQATASERCKAGIVSYVYSVNPDQVAQVT

SEQ ID NO: 2394 - protein, 251 aa, synthetic construct
  source 1..251: note = MG160-4_S186N
VTQKWTHRYQLKPGRWVFAPTDEAKKCGAHIKRSVASRWKAPNFYYHLRNGGHVAAVRSHELSRFFFRADLDDFFGRVNRSRVTRCLKPWFSYAEAREMASESVVKRPGETAFVLPYGFVQSPILASLALDKSKLGSLLRSLDGGRDFTVSVYVDDIIISGDDEAQLKEVASRLERVASEALFPLNSGKTQGPASGVTVFNIELSHRMLRITDDRLASLRLDYQATASERCKAGIVSYVYSVNPDQVAQVT

SEQ ID NO: 2395 - protein, 251 aa, synthetic construct
  source 1..251: note = MG160-4_S187R
VTQKWTHRYQLKPGRWVFAPTDEAKKCGAHIKRSVASRWKAPNFYYHLRNGGHVAAVRSHELSRFFFRADLDDFFGRVNRSRVTRCLKPWFSYAEAREMASESVVKRPGETAFVLPYGFVQSPILASLALDKSKLGSLLRSLDGGRDFTVSVYVDDIIISGDDEAQLKEVASRLERVASEALFPLSRGKTQGPASGVTVFNIELSHRMLRITDDRLASLRLDYQATASERCKAGIVSYVYSVNPDQVAQVT

SEQ ID NO: 2396 - protein, 251 aa, synthetic construct
  source 1..251: note = MG160-4_S187D
VTQKWTHRYQLKPGRWVFAPTDEAKKCGAHIKRSVASRWKAPNFYYHLRNGGHVAAVRSHELSRFFFRADLDDFFGRVNRSRVTRCLKPWFSYAEAREMASESVVKRPGETAFVLPYGFVQSPILASLALDKSKLGSLLRSLDGGRDFTVSVYVDDIIISGDDEAQLKEVASRLERVASEALFPLSDGKTQGPASGVTVFNIELSHRMLRITDDRLASLRLDYQATASERCKAGIVSYVYSVNPDQVAQVT

SEQ ID NO: 2397 - protein, 251 aa, synthetic construct
  source 1..251: note = MG160-4_S187E
VTQKWTHRYQLKPGRWVFAPTDEAKKCGAHIKRSVASRWKAPNFYYHLRNGGHVAAVRSHELSRFFFRADLDDFFGRVNRSRVTRCLKPWFSYAEAREMASESVVKRPGETAFVLPYGFVQSPILASLALDKSKLGSLLRSLDGGRDFTVSVYVDDIIISGDDEAQLKEVASRLERVASEALFPLSEGKTQGPASGVTVFNIELSHRMLRITDDRLASLRLDYQATASERCKAGIVSYVYSVNPDQVAQVT

SEQ ID NO: 2398 - protein, 251 aa, synthetic construct
  source 1..251: note = MG160-4_G188K
VTQKWTHRYQLKPGRWVFAPTDEAKKCGAHIKRSVASRWKAPNFYYHLRNGGHVAAVRSHELSRFFFRADLDDFFGRVNRSRVTRCLKPWFSYAEAREMASESVVKRPGETAFVLPYGFVQSPILASLALDKSKLGSLLRSLDGGRDFTVSVYVDDIIISGDDEAQLKEVASRLERVASEALFPLSSKKTQGPASGVTVFNIELSHRMLRITDDRLASLRLDYQATASERCKAGIVSYVYSVNPDQVAQVT

SEQ ID NO: 2399 - protein, 251 aa, synthetic construct
  source 1..251: note = MG160-4_G188D
VTQKWTHRYQLKPGRWVFAPTDEAKKCGAHIKRSVASRWKAPNFYYHLRNGGHVAAVRSHELSRFFFRADLDDFFGRVNRSRVTRCLKPWFSYAEAREMASESVVKRPGETAFVLPYGFVQSPILASLALDKSKLGSLLRSLDGGRDFTVSVYVDDIIISGDDEAQLKEVASRLERVASEALFPLSSDKTQGPASGVTVFNIELSHRMLRITDDRLASLRLDYQATASERCKAGIVSYVYSVNPDQVAQVT

SEQ ID NO: 2400 - protein, 251 aa, synthetic construct
  source 1..251: note = MG160-4_G188E
VTQKWTHRYQLKPGRWVFAPTDEAKKCGAHIKRSVASRWKAPNFYYHLRNGGHVAAVRSHELSRFFFRADLDDFFGRVNRSRVTRCLKPWFSYAEAREMASESVVKRPGETAFVLPYGFVQSPILASLALDKSKLGSLLRSLDGGRDFTVSVYVDDIIISGDDEAQLKEVASRLERVASEALFPLSSEKTQGPASGVTVFNIELSHRMLRITDDRLASLRLDYQATASERCKAGIVSYVYSVNPDQVAQVT

SEQ ID NO: 2401 - protein, 251 aa, synthetic construct
  source 1..251: note = MG160-4_Q191E
VTQKWTHRYQLKPGRWVFAPTDEAKKCGAHIKRSVASRWKAPNFYYHLRNGGHVAAVRSHELSRFFFRADLDDFFGRVNRSRVTRCLKPWFSYAEAREMASESVVKRPGETAFVLPYGFVQSPILASLALDKSKLGSLLRSLDGGRDFTVSVYVDDIIISGDDEAQLKEVASRLERVASEALFPLSSGKTEGPASGVTVFNIELSHRMLRITDDRLASLRLDYQATASERCKAGIVSYVYSVNPDQVAQVT

SEQ ID NO: 2402 - protein, 251 aa, synthetic construct
  source 1..251: note = MG160-4_S195R
VTQKWTHRYQLKPGRWVFAPTDEAKKCGAHIKRSVASRWKAPNFYYHLRNGGHVAAVRSHELSRFFFRADLDDFFGRVNRSRVTRCLKPWFSYAEAREMASESVVKRPGETAFVLPYGFVQSPILASLALDKSKLGSLLRSLDGGRDFTVSVYVDDIIISGDDEAQLKEVASRLERVASEALFPLSSGKTQGPARGVTVFNIELSHRMLRITDDRLASLRLDYQATASERCKAGIVSYVYSVNPDQVAQVT

SEQ ID NO: 2403 - protein, 251 aa, synthetic construct
  source 1..251: note = MG160-4_S195D
VTQKWTHRYQLKPGRWVFAPTDEAKKCGAHIKRSVASRWKAPNFYYHLRNGGHVAAVRSHELSRFFFRADLDDFFGRVNRSRVTRCLKPWFSYAEAREMASESVVKRPGETAFVLPYGFVQSPILASLALDKSKLGSLLRSLDGGRDFTVSVYVDDIIISGDDEAQLKEVASRLERVASEALFPLSSGKTQGPADGVTVFNIELSHRMLRITDDRLASLRLDYQATASERCKAGIVSYVYSVNPDQVAQVT

SEQ ID NO: 2404 - protein, 251 aa, synthetic construct
  source 1..251: note = MG160-4_G196K
VTQKWTHRYQLKPGRWVFAPTDEAKKCGAHIKRSVASRWKAPNFYYHLRNGGHVAAVRSHELSRFFFRADLDDFFGRVNRSRVTRCLKPWFSYAEAREMASESVVKRPGETAFVLPYGFVQSPILASLALDKSKLGSLLRSLDGGRDFTVSVYVDDIIISGDDEAQLKEVASRLERVASEALFPLSSGKTQGPASKVTVFNIELSHRMLRITDDRLASLRLDYQATASERCKAGIVSYVYSVNPDQVAQVT

SEQ ID NO: 2405 - protein, 251 aa, synthetic construct
  source 1..251: note = MG160-4_T198K
VTQKWTHRYQLKPGRWVFAPTDEAKKCGAHIKRSVASRWKAPNFYYHLRNGGHVAAVRSHELSRFFFRADLDDFFGRVNRSRVTRCLKPWFSYAEAREMASESVVKRPGETAFVLPYGFVQSPILASLALDKSKLGSLLRSLDGGRDFTVSVYVDDIIISGDDEAQLKEVASRLERVASEALFPLSSGKTQGPASGVKVFNIELSHRMLRITDDRLASLRLDYQATASERCKAGIVSYVYSVNPDQVAQVT

SEQ ID NO: 2406 - protein, 251 aa, synthetic construct
  source 1..251: note = MG160-4_T198R
VTQKWTHRYQLKPGRWVFAPTDEAKKCGAHIKRSVASRWKAPNFYYHLRNGGHVAAVRSHELSRFFFRADLDDFFGRVNRSRVTRCLKPWFSYAEAREMASESVVKRPGETAFVLPYGFVQSPILASLALDKSKLGSLLRSLDGGRDFTVSVYVDDIIISGDDEAQLKEVASRLERVASEALFPLSSGKTQGPASGVRVFNIELSHRMLRITDDRLASLRLDYQATASERCKAGIVSYVYSVNPDQVAQVT

SEQ ID NO: 2407 - protein, 251 aa, synthetic construct
  source 1..251: note = MG160-4_V199A
VTQKWTHRYQLKPGRWVFAPTDEAKKCGAHIKRSVASRWKAPNFYYHLRNGGHVAAVRSHELSRFFFRADLDDFFGRVNRSRVTRCLKPWFSYAEAREMASESVVKRPGETAFVLPYGFVQSPILASLALDKSKLGSLLRSLDGGRDFTVSVYVDDIIISGDDEAQLKEVASRLERVASEALFPLSSGKTQGPASGVTAFNIELSHRMLRITDDRLASLRLDYQATASERCKAGIVSYVYSVNPDQVAQVT

SEQ ID NO: 2408 - protein, 251 aa, synthetic construct
  source 1..251: note = MG160-4_M208N
VTQKWTHRYQLKPGRWVFAPTDEAKKCGAHIKRSVASRWKAPNFYYHLRNGGHVAAVRSHELSRFFFRADLDDFFGRVNRSRVTRCLKPWFSYAEAREMASESVVKRPGETAFVLPYGFVQSPILASLALDKSKLGSLLRSLDGGRDFTVSVYVDDIIISGDDEAQLKEVASRLERVASEALFPLSSGKTQGPASGVTVFNIELSHRNLRITDDRLASLRLDYQATASERCKAGIVSYVYSVNPDQVAQVT

SEQ ID NO: 2409 - protein, 251 aa, synthetic construct
  source 1..251: note = MG160-4_F200R
VTQKWTHRYQLKPGRWVFAPTDEAKKCGAHIKRSVASRWKAPNFYYHLRNGGHVAAVRSHELSRFFFRADLDDFFGRVNRSRVTRCLKPWFSYAEAREMASESVVKRPGETAFVLPYGFVQSPILASLALDKSKLGSLLRSLDGGRDFTVSVYVDDIIISGDDEAQLKEVASRLERVASEALFPLSSGKTQGPASGVTVRNIELSHRMLRITDDRLASLRLDYQATASERCKAGIVSYVYSVNPDQVAQVT

SEQ ID NO: 2410 - protein, 251 aa, synthetic construct
  source 1..251: note = MG160-4_N201R
VTQKWTHRYQLKPGRWVFAPTDEAKKCGAHIKRSVASRWKAPNFYYHLRNGGHVAAVRSHELSRFFFRADLDDFFGRVNRSRVTRCLKPWFSYAEAREMASESVVKRPGETAFVLPYGFVQSPILASLALDKSKLGSLLRSLDGGRDFTVSVYVDDIIISGDDEAQLKEVASRLERVASEALFPLSSGKTQGPASGVTVFRIELSHRMLRITDDRLASLRLDYQATASERCKAGIVSYVYSVNPDQVAQVT

SEQ ID NO: 2411 - protein, 251 aa, synthetic construct
  source 1..251: note = MG160-4_E203R
VTQKWTHRYQLKPGRWVFAPTDEAKKCGAHIKRSVASRWKAPNFYYHLRNGGHVAAVRSHELSRFFFRADLDDFFGRVNRSRVTRCLKPWFSYAEAREMASESVVKRPGETAFVLPYGFVQSPILASLALDKSKLGSLLRSLDGGRDFTVSVYVDDIIISGDDEAQLKEVASRLERVASEALFPLSSGKTQGPASGVTVFNIRLSHRMLRITDDRLASLRLDYQATASERCKAGIVSYVYSVNPDQVAQVT

SEQ ID NO: 2412 - protein, 251 aa, synthetic construct
  source 1..251: note = MG160-4_S205R
VTQKWTHRYQLKPGRWVFAPTDEAKKCGAHIKRSVASRWKAPNFYYHLRNGGHVAAVRSHELSRFFFRADLDDFFGRVNRSRVTRCLKPWFSYAEAREMASESVVKRPGETAFVLPYGFVQSPILASLALDKSKLGSLLRSLDGGRDFTVSVYVDDIIISGDDEAQLKEVASRLERVASEALFPLSSGKTQGPASGVTVFNIELRHRMLRITDDRLASLRLDYQATASERCKAGIVSYVYSVNPDQVAQVT

SEQ ID NO: 2413 - protein, 251 aa, synthetic construct
  source 1..251: note = MG160-4_R210K
VTQKWTHRYQLKPGRWVFAPTDEAKKCGAHIKRSVASRWKAPNFYYHLRNGGHVAAVRSHELSRFFFRADLDDFFGRVNRSRVTRCLKPWFSYAEAREMASESVVKRPGETAFVLPYGFVQSPILASLALDKSKLGSLLRSLDGGRDFTVSVYVDDIIISGDDEAQLKEVASRLERVASEALFPLSSGKTQGPASGVTVFNIELSHRMLKITDDRLASLRLDYQATASERCKAGIVSYVYSVNPDQVAQVT

SEQ ID NO: 2414 - protein, 251 aa, synthetic construct
  source 1..251: note = MG160-4_D213R
VTQKWTHRYQLKPGRWVFAPTDEAKKCGAHIKRSVASRWKAPNFYYHLRNGGHVAAVRSHELSRFFFRADLDDFFGRVNRSRVTRCLKPWFSYAEAREMASESVVKRPGETAFVLPYGFVQSPILASLALDKSKLGSLLRSLDGGRDFTVSVYVDDIIISGDDEAQLKEVASRLERVASEALFPLSSGKTQGPASGVTVFNIELSHRMLRITRDRLASLRLDYQATASERCKAGIVSYVYSVNPDQVAQVT

SEQ ID NO: 2415 - protein, 251 aa, synthetic construct
  source 1..251: note = MG160-4_A217N
VTQKWTHRYQLKPGRWVFAPTDEAKKCGAHIKRSVASRWKAPNFYYHLRNGGHVAAVRSHELSRFFFRADLDDFFGRVNRSRVTRCLKPWFSYAEAREMASESVVKRPGETAFVLPYGFVQSPILASLALDKSKLGSLLRSLDGGRDFTVSVYVDDIIISGDDEAQLKEVASRLERVASEALFPLSSGKTQGPASGVTVFNIELSHRMLRITDDRLNSLRLDYQATASERCKAGIVSYVYSVNPDQVAQVT

SEQ ID NO: 2416 - protein, 251 aa, synthetic construct
  source 1..251: note = MG160-4_S218Q
VTQKWTHRYQLKPGRWVFAPTDEAKKCGAHIKRSVASRWKAPNFYYHLRNGGHVAAVRSHELSRFFFRADLDDFFGRVNRSRVTRCLKPWFSYAEAREMASESVVKRPGETAFVLPYGFVQSPILASLALDKSKLGSLLRSLDGGRDFTVSVYVDDIIISGDDEAQLKEVASRLERVASEALFPLSSGKTQGPASGVTVFNIELSHRMLRITDDRLAQLRLDYQATASERCKAGIVSYVYSVNPDQVAQVT

SEQ ID NO: 2417 - protein, 251 aa, synthetic construct
  source 1..251: note = MG160-4_S218R
VTQKWTHRYQLKPGRWVFAPTDEAKKCGAHIKRSVASRWKAPNFYYHLRNGGHVAAVRSHELSRFFFRADLDDFFGRVNRSRVTRCLKPWFSYAEAREMASESVVKRPGETAFVLPYGFVQSPILASLALDKSKLGSLLRSLDGGRDFTVSVYVDDIIISGDDEAQLKEVASRLERVASEALFPLSSGKTQGPASGVTVFNIELSHRMLRITDDRLARLRLDYQATASERCKAGIVSYVYSVNPDQVAQVT

SEQ ID NO: 2418 - protein, 251 aa, synthetic construct
  source 1..251: note = MG160-4_R220M
VTQKWTHRYQLKPGRWVFAPTDEAKKCGAHIKRSVASRWKAPNFYYHLRNGGHVAAVRSHELSRFFFRADLDDFFGRVNRSRVTRCLKPWFSYAEAREMASESVVKRPGETAFVLPYGFVQSPILASLALDKSKLGSLLRSLDGGRDFTVSVYVDDIIISGDDEAQLKEVASRLERVASEALFPLSSGKTQGPASGVTVFNIELSHRMLRITDDRLASLMLDYQATASERCKAGIVSYVYSVNPDQVAQVT

SEQ ID NO: 2419 - protein, 251 aa, synthetic construct
  source 1..251: note = MG160-4_L221E
VTQKWTHRYQLKPGRWVFAPTDEAKKCGAHIKRSVASRWKAPNFYYHLRNGGHVAAVRSHELSRFFFRADLDDFFGRVNRSRVTRCLKPWFSYAEAREMASESVVKRPGETAFVLPYGFVQSPILASLALDKSKLGSLLRSLDGGRDFTVSVYVDDIIISGDDEAQLKEVASRLERVASEALFPLSSGKTQGPASGVTVFNIELSHRMLRITDDRLASLREDYQATASERCKAGIVSYVYSVNPDQVAQVT

SEQ ID NO: 2420 - protein, 251 aa, synthetic construct
  source 1..251: note = MG160-4_D222A
VTQKWTHRYQLKPGRWVFAPTDEAKKCGAHIKRSVASRWKAPNFYYHLRNGGHVAAVRSHELSRFFFRADLDDFFGRVNRSRVTRCLKPWFSYAEAREMASESVVKRPGETAFVLPYGFVQSPILASLALDKSKLGSLLRSLDGGRDFTVSVYVDDIIISGDDEAQLKEVASRLERVASEALFPLSSGKTQGPASGVTVFNIELSHRMLRITDDRLASLRLAYQATASERCKAGIVSYVYSVNPDQVAQVT

SEQ ID NO: 2421 - protein, 251 aa, synthetic construct
  source 1..251: note = MG160-4_D222R
VTQKWTHRYQLKPGRWVFAPTDEAKKCGAHIKRSVASRWKAPNFYYHLRNGGHVAAVRSHELSRFFFRADLDDFFGRVNRSRVTRCLKPWFSYAEAREMASESVVKRPGETAFVLPYGFVQSPILASLALDKSKLGSLLRSLDGGRDFTVSVYVDDIIISGDDEAQLKEVASRLERVASEALFPLSSGKTQGPASGVTVFNIELSHRMLRITDDRLASLRLRYQATASERCKAGIVSYVYSVNPDQVAQVT

SEQ ID NO: 2422 - protein, 251 aa, synthetic construct
  source 1..251: note = MG160-4_Q224K
VTQKWTHRYQLKPGRWVFAPTDEAKKCGAHIKRSVASRWKAPNFYYHLRNGGHVAAVRSHELSRFFFRADLDDFFGRVNRSRVTRCLKPWFSYAEAREMASESVVKRPGETAFVLPYGFVQSPILASLALDKSKLGSLLRSLDGGRDFTVSVYVDDIIISGDDEAQLKEVASRLERVASEALFPLSSGKTQGPASGVTVFNIELSHRMLRITDDRLASLRLDYKATASERCKAGIVSYVYSVNPDQVAQVT

SEQ ID NO: 2423 - protein, 251 aa, synthetic construct
  source 1..251: note = MG160-4_T226A
VTQKWTHRYQLKPGRWVFAPTDEAKKCGAHIKRSVASRWKAPNFYYHLRNGGHVAAVRSHELSRFFFRADLDDFFGRVNRSRVTRCLKPWFSYAEAREMASESVVKRPGETAFVLPYGFVQSPILASLALDKSKLGSLLRSLDGGRDFTVSVYVDDIIISGDDEAQLKEVASRLERVASEALFPLSSGKTQGPASGVTVFNIELSHRMLRITDDRLASLRLDYQAAASERCKAGIVSYVYSVNPDQVAQVT

SEQ ID NO: 2424 - protein, 251 aa, synthetic construct
  source 1..251: note = MG160-4_T226R
VTQKWTHRYQLKPGRWVFAPTDEAKKCGAHIKRSVASRWKAPNFYYHLRNGGHVAAVRSHELSRFFFRADLDDFFGRVNRSRVTRCLKPWFSYAEAREMASESVVKRPGETAFVLPYGFVQSPILASLALDKSKLGSLLRSLDGGRDFTVSVYVDDIIISGDDEAQLKEVASRLERVASEALFPLSSGKTQGPASGVTVFNIELSHRMLRITDDRLASLRLDYQARASERCKAGIVSYVYSVNPDQVAQVT

SEQ ID NO: 2425 - protein, 251 aa, synthetic construct
  source 1..251: note = MG160-4_A227N
VTQKWTHRYQLKPGRWVFAPTDEAKKCGAHIKRSVASRWKAPNFYYHLRNGGHVAAVRSHELSRFFFRADLDDFFGRVNRSRVTRCLKPWFSYAEAREMASESVVKRPGETAFVLPYGFVQSPILASLALDKSKLGSLLRSLDGGRDFTVSVYVDDIIISGDDEAQLKEVASRLERVASEALFPLSSGKTQGPASGVTVFNIELSHRMLRITDDRLASLRLDYQATNSERCKAGIVSYVYSVNPDQVAQVT

SEQ ID NO: 2426 - protein, 251 aa, synthetic construct
  source 1..251: note = MG160-4_S228N
VTQKWTHRYQLKPGRWVFAPTDEAKKCGAHIKRSVASRWKAPNFYYHLRNGGHVAAVRSHELSRFFFRADLDDFFGRVNRSRVTRCLKPWFSYAEAREMASESVVKRPGETAFVLPYGFVQSPILASLALDKSKLGSLLRSLDGGRDFTVSVYVDDIIISGDDEAQLKEVASRLERVASEALFPLSSGKTQGPASGVTVFNIELSHRMLRITDDRLASLRLDYQATANERCKAGIVSYVYSVNPDQVAQVT

SEQ ID NO: 2427 - protein, 251 aa, synthetic construct
  source 1..251: note = MG160-4_E229K
VTQKWTHRYQLKPGRWVFAPTDEAKKCGAHIKRSVASRWKAPNFYYHLRNGGHVAAVRSHELSRFFFRADLDDFFGRVNRSRVTRCLKPWFSYAEAREMASESVVKRPGETAFVLPYGFVQSPILASLALDKSKLGSLLRSLDGGRDFTVSVYVDDIIISGDDEAQLKEVASRLERVASEALFPLSSGKTQGPASGVTVFNIELSHRMLRITDDRLASLRLDYQATASKRCKAGIVSYVYSVNPDQVAQVT

SEQ ID NO: 2428 - protein, 251 aa, synthetic construct
  source 1..251: note = MG160-4_H230Q
VTQKWTHRYQLKPGRWVFAPTDEAKKCGAHIKRSVASRWKAPNFYYHLRNGGHVAAVRSHELSRFFFRADLDDFFGRVNRSRVTRCLKPWFSYAEAREMASESVVKRPGETAFVLPYGFVQSPILASLALDKSKLGSLLRSLDGGRDFTVSVYVDDIIISGDDEAQLKEVASRLERVASEALFPLSSGKTQGPASGVTVFNIELSHRMLRITDDRLASLRLDYQATASEQCKAGIVSYVYSVNPDQVAQVT

SEQ ID NO: 2429 - protein, 251 aa, synthetic construct
  source 1..251: note = MG160-4_H230N
VTQKWTHRYQLKPGRWVFAPTDEAKKCGAHIKRSVASRWKAPNFYYHLRNGGHVAAVRSHELSRFFFRADLDDFFGRVNRSRVTRCLKPWFSYAEAREMASESVVKRPGETAFVLPYGFVQSPILASLALDKSKLGSLLRSLDGGRDFTVSVYVDDIIISGDDEAQLKEVASRLERVASEALFPLSSGKTQGPASGVTVFNIELSHRMLRITDDRLASLRLDYQATASENCKAGIVSYVYSVNPDQVAQVT

SEQ ID NO: 2430 - protein, 251 aa, synthetic construct
  source 1..251: note = MG160-4_C231Q
VTQKWTHRYQLKPGRWVFAPTDEAKKCGAHIKRSVASRWKAPNFYYHLRNGGHVAAVRSHELSRFFFRADLDDFFGRVNRSRVTRCLKPWFSYAEAREMASESVVKRPGETAFVLPYGFVQSPILASLALDKSKLGSLLRSLDGGRDFTVSVYVDDIIISGDDEAQLKEVASRLERVASEALFPLSSGKTQGPASGVTVFNIELSHRMLRITDDRLASLRLDYQATASERQKAGIVSYVYSVNPDQVAQVT

SEQ ID NO: 2431 - protein, 251 aa, synthetic construct
  source 1..251: note = MG160-4_K232R
VTQKWTHRYQLKPGRWVFAPTDEAKKCGAHIKRSVASRWKAPNFYYHLRNGGHVAAVRSHELSRFFFRADLDDFFGRVNRSRVTRCLKPWFSYAEAREMASESVVKRPGETAFVLPYGFVQSPILASLALDKSKLGSLLRSLDGGRDFTVSVYVDDIIISGDDEAQLKEVASRLERVASEALFPLSSGKTQGPASGVTVFNIELSHRMLRITDDRLASLRLDYQATASERCRAGIVSYVYSVNPDQVAQVT

SEQ ID NO: 2432 - protein, 251 aa, synthetic construct
  source 1..251: note = MG160-4_A233K
VTQKWTHRYQLKPGRWVFAPTDEAKKCGAHIKRSVASRWKAPNFYYHLRNGGHVAAVRSHELSRFFFRADLDDFFGRVNRSRVTRCLKPWFSYAEAREMASESVVKRPGETAFVLPYGFVQSPILASLALDKSKLGSLLRSLDGGRDFTVSVYVDDIIISGDDEAQLKEVASRLERVASEALFPLSSGKTQGPASGVTVFNIELSHRMLRITDDRLASLRLDYQATASERCKKGIVSYVYSVNPDQVAQVT

SEQ ID NO: 2433 - protein, 251 aa, synthetic construct
  source 1..251: note = MG160-4_A233E
VTQKWTHRYQLKPGRWVFAPTDEAKKCGAHIKRSVASRWKAPNFYYHLRNGGHVAAVRSHELSRFFFRADLDDFFGRVNRSRVTRCLKPWFSYAEAREMASESVVKRPGETAFVLPYGFVQSPILASLALDKSKLGSLLRSLDGGRDFTVSVYVDDIIISGDDEAQLKEVASRLERVASEALFPLSSGKTQGPASGVTVFNIELSHRMLRITDDRLASLRLDYQATASERCKEGIVSYVYSVNPDQVAQVT

SEQ ID NO: 2434 - protein, 251 aa, synthetic construct
  source 1..251: note = MG160-4_G234R
VTQKWTHRYQLKPGRWVFAPTDEAKKCGAHIKRSVASRWKAPNFYYHLRNGGHVAAVRSHELSRFFFRADLDDFFGRVNRSRVTRCLKPWFSYAEAREMASESVVKRPGETAFVLPYGFVQSPILASLALDKSKLGSLLRSLDGGRDFTVSVYVDDIIISGDDEAQLKEVASRLERVASEALFPLSSGKTQGPASGVTVFNIELSHRMLRITDDRLASLRLDYQATASERCKARIVSYVYSVNPDQVAQVT

SEQ ID NO: 2435 - protein, 251 aa, synthetic construct
  source 1..251: note = MG160-4_V236A
VTQKWTHRYQLKPGRWVFAPTDEAKKCGAHIKRSVASRWKAPNFYYHLRNGGHVAAVRSHELSRFFFRADLDDFFGRVNRSRVTRCLKPWFSYAEAREMASESVVKRPGETAFVLPYGFVQSPILASLALDKSKLGSLLRSLDGGRDFTVSVYVDDIIISGDDEAQLKEVASRLERVASEALFPLSSGKTQGPASGVTVFNIELSHRMLRITDDRLASLRLDYQATASERCKAGIASYVYSVNPDQVAQVT

SEQ ID NO: 2436 - protein, 251 aa, synthetic construct
  source 1..251: note = MG160-4_V236L
VTQKWTHRYQLKPGRWVFAPTDEAKKCGAHIKRSVASRWKAPNFYYHLRNGGHVAAVRSHELSRFFFRADLDDFFGRVNRSRVTRCLKPWFSYAEAREMASESVVKRPGETAFVLPYGFVQSPILASLALDKSKLGSLLRSLDGGRDFTVSVYVDDIIISGDDEAQLKEVASRLERVASEALFPLSSGKTQGPASGVTVFNIELSHRMLRITDDRLASLRLDYQATASERCKAGILSYVYSVNPDQVAQVT

SEQ ID NO: 2437 - protein, 251 aa, synthetic construct
  source 1..251: note = MG160-4_S237R
VTQKWTHRYQLKPGRWVFAPTDEAKKCGAHIKRSVASRWKAPNFYYHLRNGGHVAAVRSHELSRFFFRADLDDFFGRVNRSRVTRCLKPWFSYAEAREMASESVVKRPGETAFVLPYGFVQSPILASLALDKSKLGSLLRSLDGGRDFTVSVYVDDIIISGDDEAQLKEVASRLERVASEALFPLSSGKTQGPASGVTVFNIELSHRMLRITDDRLASLRLDYQATASERCKAGIVRYVYSVNPDQVAQVT

SEQ ID NO: 2438 - protein, 251 aa, synthetic construct
  source 1..251: note = MG160-4_S237G
VTQKWTHRYQLKPGRWVFAPTDEAKKCGAHIKRSVASRWKAPNFYYHLRNGGHVAAVRSHELSRFFFRADLDDFFGRVNRSRVTRCLKPWFSYAEAREMASESVVKRPGETAFVLPYGFVQSPILASLALDKSKLGSLLRSLDGGRDFTVSVYVDDIIISGDDEAQLKEVASRLERVASEALFPLSSGKTQGPASGVTVFNIELSHRMLRITDDRLASLRLDYQATASERCKAGIVGYVYSVNPDQVAQVT

SEQ ID NO: 2439 - protein, 251 aa, synthetic construct
  source 1..251: note = MG160-4_S237N
VTQKWTHRYQLKPGRWVFAPTDEAKKCGAHIKRSVASRWKAPNFYYHLRNGGHVAAVRSHELSRFFFRADLDDFFGRVNRSRVTRCLKPWFSYAEAREMASESVVKRPGETAFVLPYGFVQSPILASLALDKSKLGSLLRSLDGGRDFTVSVYVDDIIISGDDEAQLKEVASRLERVASEALFPLSSGKTQGPASGVTVFNIELSHRMLRITDDRLASLRLDYQATASERCKAGIVNYVYSVNPDQVAQVT

SEQ ID NO: 2440 - protein, 251 aa, synthetic construct
  source 1..251: note = MG160-4_V239I
VTQKWTHRYQLKPGRWVFAPTDEAKKCGAHIKRSVASRWKAPNFYYHLRNGGHVAAVRSHELSRFFFRADLDDFFGRVNRSRVTRCLKPWFSYAEAREMASESVVKRPGETAFVLPYGFVQSPILASLALDKSKLGSLLRSLDGGRDFTVSVYVDDIIISGDDEAQLKEVASRLERVASEALFPLSSGKTQGPASGVTVFNIELSHRMLRITDDRLASLRLDYQATASERCKAGIVSYIYSVNPDQVAQVT

SEQ ID NO: 2441 - protein, 251 aa, synthetic construct
  source 1..251: note = MG160-4_Y240S
VTQKWTHRYQLKPGRWVFAPTDEAKKCGAHIKRSVASRWKAPNFYYHLRNGGHVAAVRSHELSRFFFRADLDDFFGRVNRSRVTRCLKPWFSYAEAREMASESVVKRPGETAFVLPYGFVQSPILASLALDKSKLGSLLRSLDGGRDFTVSVYVDDIIISGDDEAQLKEVASRLERVASEALFPLSSGKTQGPASGVTVFNIELSHRMLRITDDRLASLRLDYQATASERCKAGIVSYVSSVNPDQVAQVT

SEQ ID NO: 2442 - protein, 251 aa, synthetic construct
  source 1..251: note = MG160-4_Y240L
VTQKWTHRYQLKPGRWVFAPTDEAKKCGAHIKRSVASRWKAPNFYYHLRNGGHVAAVRSHELSRFFFRADLDDFFGRVNRSRVTRCLKPWFSYAEAREMASESVVKRPGETAFVLPYGFVQSPILASLALDKSKLGSLLRSLDGGRDFTVSVYVDDIIISGDDEAQLKEVASRLERVASEALFPLSSGKTQGPASGVTVFNIELSHRMLRITDDRLASLRLDYQATASERCKAGIVSYVLSVNPDQVAQVT

SEQ ID NO: 2443 - protein, 251 aa, synthetic construct
  source 1..251: note = MG160-4_Y240R
VTQKWTHRYQLKPGRWVFAPTDEAKKCGAHIKRSVASRWKAPNFYYHLRNGGHVAAVRSHELSRFFFRADLDDFFGRVNRSRVTRCLKPWFSYAEAREMASESVVKRPGETAFVLPYGFVQSPILASLALDKSKLGSLLRSLDGGRDFTVSVYVDDIIISGDDEAQLKEVASRLERVASEALFPLSSGKTQGPASGVTVFNIELSHRMLRITDDRLASLRLDYQATASERCKAGIVSYVRSVNPDQVAQVT

SEQ ID NO: 2444 - protein, 251 aa, synthetic construct
  source 1..251: note = MG160-4_S241R
VTQKWTHRYQLKPGRWVFAPTDEAKKCGAHIKRSVASRWKAPNFYYHLRNGGHVAAVRSHELSRFFFRADLDDFFGRVNRSRVTRCLKPWFSYAEAREMASESVVKRPGETAFVLPYGFVQSPILASLALDKSKLGSLLRSLDGGRDFTVSVYVDDIIISGDDEAQLKEVASRLERVASEALFPLSSGKTQGPASGVTVFNIELSHRMLRITDDRLASLRLDYQATASERCKAGIVSYVYRVNPDQVAQVT

SEQ ID NO: 2445 - protein, 251 aa, synthetic construct
  source 1..251: note = MG160-4_S241T
VTQKWTHRYQLKPGRWVFAPTDEAKKCGAHIKRSVASRWKAPNFYYHLRNGGHVAAVRSHELSRFFFRADLDDFFGRVNRSRVTRCLKPWFSYAEAREMASESVVKRPGETAFVLPYGFVQSPILASLALDKSKLGSLLRSLDGGRDFTVSVYVDDIIISGDDEAQLKEVASRLERVASEALFPLSSGKTQGPASGVTVFNIELSHRMLRITDDRLASLRLDYQATASERCKAGIVSYVYTVNPDQVAQVT

SEQ ID NO: 2446 - protein, 251 aa, synthetic construct
  source 1..251: note = MG160-4_N243R
VTQKWTHRYQLKPGRWVFAPTDEAKKCGAHIKRSVASRWKAPNFYYHLRNGGHVAAVRSHELSRFFFRADLDDFFGRVNRSRVTRCLKPWFSYAEAREMASESVVKRPGETAFVLPYGFVQSPILASLALDKSKLGSLLRSLDGGRDFTVSVYVDDIIISGDDEAQLKEVASRLERVASEALFPLSSGKTQGPASGVTVFNIELSHRMLRITDDRLASLRLDYQATASERCKAGIVSYVYSVRPDQVAQVT

SEQ ID NO: 2447 - protein, 251 aa, synthetic construct
  source 1..251: note = MG160-4_D245R
VTQKWTHRYQLKPGRWVFAPTDEAKKCGAHIKRSVASRWKAPNFYYHLRNGGHVAAVRSHELSRFFFRADLDDFFGRVNRSRVTRCLKPWFSYAEAREMASESVVKRPGETAFVLPYGFVQSPILASLALDKSKLGSLLRSLDGGRDFTVSVYVDDIIISGDDEAQLKEVASRLERVASEALFPLSSGKTQGPASGVTVFNIELSHRMLRITDDRLASLRLDYQATASERCKAGIVSYVYSVNPRQVAQVT

SEQ ID NO: 2448 - protein, 251 aa, synthetic construct
  source 1..251: note = MG160-4_V247R
VTQKWTHRYQLKPGRWVFAPTDEAKKCGAHIKRSVASRWKAPNFYYHLRNGGHVAAVRSHELSRFFFRADLDDFFGRVNRSRVTRCLKPWFSYAEAREMASESVVKRPGETAFVLPYGFVQSPILASLALDKSKLGSLLRSLDGGRDFTVSVYVDDIIISGDDEAQLKEVASRLERVASEALFPLSSGKTQGPASGVTVFNIELSHRMLRITDDRLASLRLDYQATASERCKAGIVSYVYSVNPDQRAQVT

SEQ ID NO: 2449 - protein, 251 aa, synthetic construct
  source 1..251: note = MG160-4_A248E
VTQKWTHRYQLKPGRWVFAPTDEAKKCGAHIKRSVASRWKAPNFYYHLRNGGHVAAVRSHELSRFFFRADLDDFFGRVNRSRVTRCLKPWFSYAEAREMASESVVKRPGETAFVLPYGFVQSPILASLALDKSKLGSLLRSLDGGRDFTVSVYVDDIIISGDDEAQLKEVASRLERVASEALFPLSSGKTQGPASGVTVFNIELSHRMLRITDDRLASLRLDYQATASERCKAGIVSYVYSVNPDQVEQVT

SEQ ID NO: 2450 - protein, 251 aa, synthetic construct
  source 1..251: note = MG160-4_A248R
VTQKWTHRYQLKPGRWVFAPTDEAKKCGAHIKRSVASRWKAPNFYYHLRNGGHVAAVRSHELSRFFFRADLDDFFGRVNRSRVTRCLKPWFSYAEAREMASESVVKRPGETAFVLPYGFVQSPILASLALDKSKLGSLLRSLDGGRDFTVSVYVDDIIISGDDEAQLKEVASRLERVASEALFPLSSGKTQGPASGVTVFNIELSHRMLRITDDRLASLRLDYQATASERCKAGIVSYVYSVNPDQVRQVT

SEQ ID NO: 2451 - protein, 251 aa, synthetic construct
  source 1..251: note = MG160-4_Q249R
VTQKWTHRYQLKPGRWVFAPTDEAKKCGAHIKRSVASRWKAPNFYYHLRNGGHVAAVRSHELSRFFFRADLDDFFGRVNRSRVTRCLKPWFSYAEAREMASESVVKRPGETAFVLPYGFVQSPILASLALDKSKLGSLLRSLDGGRDFTVSVYVDDIIISGDDEAQLKEVASRLERVASEALFPLSSGKTQGPASGVTVFNIELSHRMLRITDDRLASLRLDYQATASERCKAGIVSYVYSVNPDQVARVT

SEQ ID NO: 2452 - protein, 251 aa, synthetic construct
  source 1..251: note = MG160-4_Q249A
VTQKWTHRYQLKPGRWVFAPTDEAKKCGAHIKRSVASRWKAPNFYYHLRNGGHVAAVRSHELSRFFFRADLDDFFGRVNRSRVTRCLKPWFSYAEAREMASESVVKRPGETAFVLPYGFVQSPILASLALDKSKLGSLLRSLDGGRDFTVSVYVDDIIISGDDEAQLKEVASRLERVASEALFPLSSGKTQGPASGVTVFNIELSHRMLRITDDRLASLRLDYQATASERCKAGIVSYVYSVNPDQVAAVT

SEQ ID NO: 2453 - protein, 251 aa, synthetic construct
  source 1..251: note = MG160-4_T251A
VTQKWTHRYQLKPGRWVFAPTDEAKKCGAHIKRSVASRWKAPNFYYHLRNGGHVAAVRSHELSRFFFRADLDDFFGRVNRSRVTRCLKPWFSYAEAREMASESVVKRPGETAFVLPYGFVQSPILASLALDKSKLGSLLRSLDGGRDFTVSVYVDDIIISGDDEAQLKEVASRLERVASEALFPLSSGKTQGPASGVTVFNIELSHRMLRITDDRLASLRLDYQATASERCKAGIVSYVYSVNPDQVAQVA

SEQ ID NO: 2454 - protein, 251 aa, synthetic construct
  source 1..251: note = MG160-4_A217K,S218E
VTQKWTHRYQLKPGRWVFAPTDEAKKCGAHIKRSVASRWKAPNFYYHLRNGGHVAAVRSHELSRFFFRADLDDFFGRVNRSRVTRCLKPWFSYAEAREMASESVVKRPGETAFVLPYGFVQSPILASLALDKSKLGSLLRSLDGGRDFTVSVYVDDIIISGDDEAQLKEVASRLERVASEALFPLSSGKTQGPASGVTVFNIELSHRMLRITDDRLKELRLDYQATASERCKAGIVSYVYSVNPDQVAQVT

SEQ ID NO: 2455 - protein, 251 aa, synthetic construct
  source 1..251: note = MG160-4_K40N,S127C,V154Y
VTQKWTHRYQLKPGRWVFAPTDEAKKCGAHIKRSVASRWNAPNFYYHLRNGGHVAAVRSHELSRFFFRADLDDFFGRVNRSRVTRCLKPWFSYAEAREMASESVVKRPGETAFVLPYGFVQSPILACLALDKSKLGSLLRSLDGGRDFTVSVYYDDIIISGDDEAQLKEVASRLERVASEALFPLSSGKTQGPASGVTVFNIELSHRMLRITDDRLASLRLDYQATASERCKAGIVSYVYSVNPDQVAQVT

SEQ ID NO: 2456 - protein, 251 aa, synthetic construct
  source 1..251: note = MG160-4_A217K,S218E,V154Y
VTQKWTHRYQLKPGRWVFAPTDEAKKCGAHIKRSVASRWKAPNFYYHLRNGGHVAAVRSHELSRFFFRADLDDFFGRVNRSRVTRCLKPWFSYAEAREMASESVVKRPGETAFVLPYGFVQSPILASLALDKSKLGSLLRSLDGGRDFTVSVYYDDIIISGDDEAQLKEVASRLERVASEALFPLSSGKTQGPASGVTVFNIELSHRMLRITDDRLKELRLDYQATASERCKAGIVSYVYSVNPDQVAQVT

SEQ ID NO: 2457 - protein, 251 aa, synthetic construct
  source 1..251: note = MG160-4_V154H
VTQKWTHRYQLKPGRWVFAPTDEAKKCGAHIKRSVASRWKAPNFYYHLRNGGHVAAVRSHELSRFFFRADLDDFFGRVNRSRVTRCLKPWFSYAEAREMASESVVKRPGETAFVLPYGFVQSPILASLALDKSKLGSLLRSLDGGRDFTVSVYHDDIIISGDDEAQLKEVASRLERVASEALFPLSSGKTQGPASGVTVFNIELSHRMLRITDDRLASLRLDYQATASERCKAGIVSYVYSVNPDQVAQVT

SEQ ID NO: 2458 - protein, 251 aa, synthetic construct
  source 1..251: note = MG160-4_V154K
VTQKWTHRYQLKPGRWVFAPTDEAKKCGAHIKRSVASRWKAPNFYYHLRNGGHVAAVRSHELSRFFFRADLDDFFGRVNRSRVTRCLKPWFSYAEAREMASESVVKRPGETAFVLPYGFVQSPILASLALDKSKLGSLLRSLDGGRDFTVSVYKDDIIISGDDEAQLKEVASRLERVASEALFPLSSGKTQGPASGVTVFNIELSHRMLRITDDRLASLRLDYQATASERCKAGIVSYVYSVNPDQVAQVT

SEQ ID NO: 2459 - protein, 251 aa, synthetic construct
  source 1..251: note = MG160-4_V154D
VTQKWTHRYQLKPGRWVFAPTDEAKKCGAHIKRSVASRWKAPNFYYHLRNGGHVAAVRSHELSRFFFRADLDDFFGRVNRSRVTRCLKPWFSYAEAREMASESVVKRPGETAFVLPYGFVQSPILASLALDKSKLGSLLRSLDGGRDFTVSVYDDDIIISGDDEAQLKEVASRLERVASEALFPLSSGKTQGPASGVTVFNIELSHRMLRITDDRLASLRLDYQATASERCKAGIVSYVYSVNPDQVAQVT

SEQ ID NO: 2460 - protein, 251 aa, synthetic construct
  source 1..251: note = MG160-4_V154E
VTQKWTHRYQLKPGRWVFAPTDEAKKCGAHIKRSVASRWKAPNFYYHLRNGGHVAAVRSHELSRFFFRADLDDFFGRVNRSRVTRCLKPWFSYAEAREMASESVVKRPGETAFVLPYGFVQSPILASLALDKSKLGSLLRSLDGGRDFTVSVYEDDIIISGDDEAQLKEVASRLERVASEALFPLSSGKTQGPASGVTVFNIELSHRMLRITDDRLASLRLDYQATASERCKAGIVSYVYSVNPDQVAQVT

SEQ ID NO: 2461 - protein, 251 aa, synthetic construct
  source 1..251: note = MG160-4_V154S
VTQKWTHRYQLKPGRWVFAPTDEAKKCGAHIKRSVASRWKAPNFYYHLRNGGHVAAVRSHELSRFFFRADLDDFFGRVNRSRVTRCLKPWFSYAEAREMASESVVKRPGETAFVLPYGFVQSPILASLALDKSKLGSLLRSLDGGRDFTVSVYSDDIIISGDDEAQLKEVASRLERVASEALFPLSSGKTQGPASGVTVFNIELSHRMLRITDDRLASLRLDYQATASERCKAGIVSYVYSVNPDQVAQVT

SEQ ID NO: 2462 - protein, 251 aa, synthetic construct
  source 1..251: note = MG160-4_V154T
VTQKWTHRYQLKPGRWVFAPTDEAKKCGAHIKRSVASRWKAPNFYYHLRNGGHVAAVRSHELSRFFFRADLDDFFGRVNRSRVTRCLKPWFSYAEAREMASESVVKRPGETAFVLPYGFVQSPILASLALDKSKLGSLLRSLDGGRDFTVSVYTDDIIISGDDEAQLKEVASRLERVASEALFPLSSGKTQGPASGVTVFNIELSHRMLRITDDRLASLRLDYQATASERCKAGIVSYVYSVNPDQVAQVT

SEQ ID NO: 2463 - protein, 251 aa, synthetic construct
  source 1..251: note = MG160-4_V154N
VTQKWTHRYQLKPGRWVFAPTDEAKKCGAHIKRSVASRWKAPNFYYHLRNGGHVAAVRSHELSRFFFRADLDDFFGRVNRSRVTRCLKPWFSYAEAREMASESVVKRPGETAFVLPYGFVQSPILASLALDKSKLGSLLRSLDGGRDFTVSVYNDDIIISGDDEAQLKEVASRLERVASEALFPLSSGKTQGPASGVTVFNIELSHRMLRITDDRLASLRLDYQATASERCKAGIVSYVYSVNPDQVAQVT

SEQ ID NO: 2464 - protein, 251 aa, synthetic construct
  source 1..251: note = MG160-4_V154Q
VTQKWTHRYQLKPGRWVFAPTDEAKKCGAHIKRSVASRWKAPNFYYHLRNGGHVAAVRSHELSRFFFRADLDDFFGRVNRSRVTRCLKPWFSYAEAREMASESVVKRPGETAFVLPYGFVQSPILASLALDKSKLGSLLRSLDGGRDFTVSVYQDDIIISGDDEAQLKEVASRLERVASEALFPLSSGKTQGPASGVTVFNIELSHRMLRITDDRLASLRLDYQATASERCKAGIVSYVYSVNPDQVAQVT

SEQ ID NO: 2465 - protein, 251 aa, synthetic construct
  source 1..251: note = MG160-4_V154C
VTQKWTHRYQLKPGRWVFAPTDEAKKCGAHIKRSVASRWKAPNFYYHLRNGGHVAAVRSHELSRFFFRADLDDFFGRVNRSRVTRCLKPWFSYAEAREMASESVVKRPGETAFVLPYGFVQSPILASLALDKSKLGSLLRSLDGGRDFTVSVYCDDIIISGDDEAQLKEVASRLERVASEALFPLSSGKTQGPASGVTVFNIELSHRMLRITDDRLASLRLDYQATASERCKAGIVSYVYSVNPDQVAQVT

SEQ ID NO: 2466 - protein, 251 aa, synthetic construct
  source 1..251: note = MG160-4_V154G
VTQKWTHRYQLKPGRWVFAPTDEAKKCGAHIKRSVASRWKAPNFYYHLRNGGHVAAVRSHELSRFFFRADLDDFFGRVNRSRVTRCLKPWFSYAEAREMASESVVKRPGETAFVLPYGFVQSPILASLALDKSKLGSLLRSLDGGRDFTVSVYGDDIIISGDDEAQLKEVASRLERVASEALFPLSSGKTQGPASGVTVFNIELSHRMLRITDDRLASLRLDYQATASERCKAGIVSYVYSVNPDQVAQVT

SEQ ID NO: 2467 - protein, 251 aa, synthetic construct
  source 1..251: note = MG160-4_V154P
VTQKWTHRYQLKPGRWVFAPTDEAKKCGAHIKRSVASRWKAPNFYYHLRNGGHVAAVRSHELSRFFFRADLDDFFGRVNRSRVTRCLKPWFSYAEAREMASESVVKRPGETAFVLPYGFVQSPILASLALDKSKLGSLLRSLDGGRDFTVSVYPDDIIISGDDEAQLKEVASRLERVASEALFPLSSGKTQGPASGVTVFNIELSHRMLRITDDRLASLRLDYQATASERCKAGIVSYVYSVNPDQVAQVT

SEQ ID NO: 2468 - protein, 251 aa, synthetic construct
  source 1..251: note = MG160-4_V154A
VTQKWTHRYQLKPGRWVFAPTDEAKKCGAHIKRSVASRWKAPNFYYHLRNGGHVAAVRSHELSRFFFRADLDDFFGRVNRSRVTRCLKPWFSYAEAREMASESVVKRPGETAFVLPYGFVQSPILASLALDKSKLGSLLRSLDGGRDFTVSVYADDIIISGDDEAQLKEVASRLERVASEALFPLSSGKTQGPASGVTVFNIELSHRMLRITDDRLASLRLDYQATASERCKAGIVSYVYSVNPDQVAQVT

SEQ ID NO: 2469 - protein, 251 aa, synthetic construct
  source 1..251: note = MG160-4_V154L
VTQKWTHRYQLKPGRWVFAPTDEAKKCGAHIKRSVASRWKAPNFYYHLRNGGHVAAVRSHELSRFFFRADLDDFFGRVNRSRVTRCLKPWFSYAEAREMASESVVKRPGETAFVLPYGFVQSPILASLALDKSKLGSLLRSLDGGRDFTVSVYLDDIIISGDDEAQLKEVASRLERVASEALFPLSSGKTQGPASGVTVFNIELSHRMLRITDDRLASLRLDYQATASERCKAGIVSYVYSVNPDQVAQVT

SEQ ID NO: 2470 - protein, 251 aa, synthetic construct
  source 1..251: note = MG160-4_V154F
VTQKWTHRYQLKPGRWVFAPTDEAKKCGAHIKRSVASRWKAPNFYYHLRNGGHVAAVRSHELSRFFFRADLDDFFGRVNRSRVTRCLKPWFSYAEAREMASESVVKRPGETAFVLPYGFVQSPILASLALDKSKLGSLLRSLDGGRDFTVSVYFDDIIISGDDEAQLKEVASRLERVASEALFPLSSGKTQGPASGVTVFNIELSHRMLRITDDRLASLRLDYQATASERCKAGIVSYVYSVNPDQVAQVT

SEQ ID NO: 2471 - protein, 251 aa, synthetic construct
  source 1..251: note = MG160-4_V154W
VTQKWTHRYQLKPGRWVFAPTDEAKKCGAHIKRSVASRWKAPNFYYHLRNGGHVAAVRSHELSRFFFRADLDDFFGRVNRSRVTRCLKPWFSYAEAREMASESVVKRPGETAFVLPYGFVQSPILASLALDKSKLGSLLRSLDGGRDFTVSVYWDDIIISGDDEAQLKEVASRLERVASEALFPLSSGKTQGPASGVTVFNIELSHRMLRITDDRLASLRLDYQATASERCKAGIVSYVYSVNPDQVAQVT

SEQ ID NO: 2472 - protein, 1120 aa, synthetic construct
  source 1..1120: note = MG140-3_D489A
MSHSTAAASSGAATGPIVIRYPVNTTNGGTTGEQACFFAESSNCGLAFVDNKSFVDHLLRAHKATRDQIQYICSHCHRQFEKIESVRSHHNICKRKEAVAPDLDARLPVECEVDGCSRRFTTTSGMRLHVKKAHPIEYHASIPQSKRNLWSEGEMRMLARMELDNPGLTNARMNELLHSLHPSRSVDVIRHMRGRNTRYREIMEELVLIGVPEDSDSQAEKTAEPEPEGRINECQLEELVKTHSQIDDARYQASIEYVRRVLRSDDPGEFFNDWLFSCFPGKEGRRIQRRKRERLPPRNAKQKRAAEFRVLQELWRKDRSRLATVILDKMPPTAKEPPIGDIEKVYTTRFERPSPEDQHEFTSKPIEEPMEMVRFITVEEVLKNLKAMKSNNAPGLDSNITMKRLRSLPLPCLQLVFNCWLAIGKAPQSMKQCRSKLLPKGAEGLDDVNNWRPLTIGSLLIRLYTRILAMRLQSKVQLHPRQKAFQPLAGCGENIAIVSSLLQDAHERKKELNIIFLDIAKAFDCVSHHSIQRALNRFGLPRAFRRVIEDLYDGATTVFQTSEGDSKTLGISSGVKQGCPLSPVLFNMVMDELIADAPSTEWGYELHDESVGLLAFADDIALVSHSRAMMSHALDYAAGFFEKRNLQLNARKCIGLSIKKAPRRKVMRIEMGSIWSLRNGSDNIPIKMLSPADMARYLGALFSPSGKQTIDLATMKGWITSIEKSRLKPHQKLVMLRTYLLPRVLHHLTIGEPNATTLRRVERELRNSVKRFLKLPVATATPFFHISTKEGGLELPPLLETIAKRKLKWEIRLQKSKDSLIRAVADSPKFRKQFDKARAWIGVPVINRPSDINRRIRELNNGRFERFTSELAVQSRCHRALASNPLRNDWLTGHNPGLYASQFIDALKLVTSQLPTREALNRGNPQADKRCRGCGFSVENQKHVISNCPLVQQERHLRHNRVAQLFARYAKEKGWNIIAEPRIRNPSGEIMRPDIVLRRDDNVAIVDIQIPYEDGGREQLAERYRQKCSKYRQLSTHIQHVLGVTNHTIGAIIVGACGTWCELNNPILDYIGVNTTAIKKNLSIEALRGTLKIFGQFKNRVFRNERVHPSQRPSSGPPVP

SEQ ID NO: 2473 - protein, 1120 aa, synthetic construct
  source 1..1120: note = MG140-3_F702A
MSHSTAAASSGAATGPIVIRYPVNTTNGGTTGEQACFFAESSNCGLAFVDNKSFVDHLLRAHKATRDQIQYICSHCHRQFEKIESVRSHHNICKRKEAVAPDLDARLPVECEVDGCSRRFTTTSGMRLHVKKAHPIEYHASIPQSKRNLWSEGEMRMLARMELDNPGLTNARMNELLHSLHPSRSVDVIRHMRGRNTRYREIMEELVLIGVPEDSDSQAEKTAEPEPEGRINECQLEELVKTHSQIDDARYQASIEYVRRVLRSDDPGEFFNDWLFSCFPGKEGRRIQRRKRERLPPRNAKQKRAAEFRVLQELWRKDRSRLATVILDKMPPTAKEPPIGDIEKVYTTRFERPSPEDQHEFTSKPIEEPMEMVRFITVEEVLKNLKAMKSNNAPGLDSNITMKRLRSLPLPCLQLVFNCWLAIGKAPQSMKQCRSKLLPKGAEGLDDVNNWRPLTIGSLLIRLYTRILAMRLQSKVQLHPRQKAFQPLDGCGENIAIVSSLLQDAHERKKELNIIFLDIAKAFDCVSHHSIQRALNRFGLPRAFRRVIEDLYDGATTVFQTSEGDSKTLGISSGVKQGCPLSPVLFNMVMDELIADAPSTEWGYELHDESVGLLAFADDIALVSHSRAMMSHALDYAAGFFEKRNLQLNARKCIGLSIKKAPRRKVMRIEMGSIWSLRNGSDNIPIKMLSPADMARYLGALASPSGKQTIDLATMKGWITSIEKSRLKPHQKLVMLRTYLLPRVLHHLTIGEPNATTLRRVERELRNSVKRFLKLPVATATPFFHISTKEGGLELPPLLETIAKRKLKWEIRLQKSKDSLIRAVADSPKFRKQFDKARAWIGVPVINRPSDINRRIRELNNGRFERFTSELAVQSRCHRALASNPLRNDWLTGHNPGLYASQFIDALKLVTSQLPTREALNRGNPQADKRCRGCGFSVENQKHVISNCPLVQQERHLRHNRVAQLFARYAKEKGWNIIAEPRIRNPSGEIMRPDIVLRRDDNVAIVDIQIPYEDGGREQLAERYRQKCSKYRQLSTHIQHVLGVTNHTIGAIIVGACGTWCELNNPILDYIGVNTTAIKKNLSIEALRGTLKIFGQFKNRVFRNERVHPSQRPSSGPPVP

SEQ ID NO: 2474 - protein, 1120 aa, synthetic construct
  source 1..1120: note = MG140-3_L698A
MSHSTAAASSGAATGPIVIRYPVNTTNGGTTGEQACFFAESSNCGLAFVDNKSFVDHLLRAHKATRDQIQYICSHCHRQFEKIESVRSHHNICKRKEAVAPDLDARLPVECEVDGCSRRFTTTSGMRLHVKKAHPIEYHASIPQSKRNLWSEGEMRMLARMELDNPGLTNARMNELLHSLHPSRSVDVIRHMRGRNTRYREIMEELVLIGVPEDSDSQAEKTAEPEPEGRINECQLEELVKTHSQIDDARYQASIEYVRRVLRSDDPGEFFNDWLFSCFPGKEGRRIQRRKRERLPPRNAKQKRAAEFRVLQELWRKDRSRLATVILDKMPPTAKEPPIGDIEKVYTTRFERPSPEDQHEFTSKPIEEPMEMVRFITVEEVLKNLKAMKSNNAPGLDSNITMKRLRSLPLPCLQLVFNCWLAIGKAPQSMKQCRSKLLPKGAEGLDDVNNWRPLTIGSLLIRLYTRILAMRLQSKVQLHPRQKAFQPLDGCGENIAIVSSLLQDAHERKKELNIIFLDIAKAFDCVSHHSIQRALNRFGLPRAFRRVIEDLYDGATTVFQTSEGDSKTLGISSGVKQGCPLSPVLFNMVMDELIADAPSTEWGYELHDESVGLLAFADDIALVSHSRAMMSHALDYAAGFFEKRNLQLNARKCIGLSIKKAPRRKVMRIEMGSIWSLRNGSDNIPIKMLSPADMARYAGALFSPSGKQTIDLATMKGWITSIEKSRLKPHQKLVMLRTYLLPRVLHHLTIGEPNATTLRRVERELRNSVKRFLKLPVATATPFFHISTKEGGLELPPLLETIAKRKLKWEIRLQKSKDSLIRAVADSPKFRKQFDKARAWIGVPVINRPSDINRRIRELNNGRFERFTSELAVQSRCHRALASNPLRNDWLTGHNPGLYASQFIDALKLVTSQLPTREALNRGNPQADKRCRGCGFSVENQKHVISNCPLVQQERHLRHNRVAQLFARYAKEKGWNIIAEPRIRNPSGEIMRPDIVLRRDDNVAIVDIQIPYEDGGREQLAERYRQKCSKYRQLSTHIQHVLGVTNHTIGAIIVGACGTWCELNNPILDYIGVNTTAIKKNLSIEALRGTLKIFGQFKNRVFRNERVHPSQRPSSGPPVP

SEQ ID NO: 2475 - protein, 1120 aa, synthetic construct
  source 1..1120: note = MG140-3_L748A
MSHSTAAASSGAATGPIVIRYPVNTTNGGTTGEQACFFAESSNCGLAFVDNKSFVDHLLRAHKATRDQIQYICSHCHRQFEKIESVRSHHNICKRKEAVAPDLDARLPVECEVDGCSRRFTTTSGMRLHVKKAHPIEYHASIPQSKRNLWSEGEMRMLARMELDNPGLTNARMNELLHSLHPSRSVDVIRHMRGRNTRYREIMEELVLIGVPEDSDSQAEKTAEPEPEGRINECQLEELVKTHSQIDDARYQASIEYVRRVLRSDDPGEFFNDWLFSCFPGKEGRRIQRRKRERLPPRNAKQKRAAEFRVLQELWRKDRSRLATVILDKMPPTAKEPPIGDIEKVYTTRFERPSPEDQHEFTSKPIEEPMEMVRFITVEEVLKNLKAMKSNNAPGLDSNITMKRLRSLPLPCLQLVFNCWLAIGKAPQSMKQCRSKLLPKGAEGLDDVNNWRPLTIGSLLIRLYTRILAMRLQSKVQLHPRQKAFQPLDGCGENIAIVSSLLQDAHERKKELNIIFLDIAKAFDCVSHHSIQRALNRFGLPRAFRRVIEDLYDGATTVFQTSEGDSKTLGISSGVKQGCPLSPVLFNMVMDELIADAPSTEWGYELHDESVGLLAFADDIALVSHSRAMMSHALDYAAGFFEKRNLQLNARKCIGLSIKKAPRRKVMRIEMGSIWSLRNGSDNIPIKMLSPADMARYLGALFSPSGKQTIDLATMKGWITSIEKSRLKPHQKLVMLRTYLLPRVLHHATIGEPNATTLRRVERELRNSVKRFLKLPVATATPFFHISTKEGGLELPPLLETIAKRKLKWEIRLQKSKDSLIRAVADSPKFRKQFDKARAWIGVPVINRPSDINRRIRELNNGRFERFTSELAVQSRCHRALASNPLRNDWLTGHNPGLYASQFIDALKLVTSQLPTREALNRGNPQADKRCRGCGFSVENQKHVISNCPLVQQERHLRHNRVAQLFARYAKEKGWNIIAEPRIRNPSGEIMRPDIVLRRDDNVAIVDIQIPYEDGGREQLAERYRQKCSKYRQLSTHIQHVLGVTNHTIGAIIVGACGTWCELNNPILDYIGVNTTAIKKNLSIEALRGTLKIFGQFKNRVFRNERVHPSQRPSSGPPVP

SEQ ID NO: 2476 - protein, 1120 aa, synthetic construct
  source 1..1120: note = MG140-3_L765A
MSHSTAAASSGAATGPIVIRYPVNTTNGGTTGEQACFFAESSNCGLAFVDNKSFVDHLLRAHKATRDQIQYICSHCHRQFEKIESVRSHHNICKRKEAVAPDLDARLPVECEVDGCSRRFTTTSGMRLHVKKAHPIEYHASIPQSKRNLWSEGEMRMLARMELDNPGLTNARMNELLHSLHPSRSVDVIRHMRGRNTRYREIMEELVLIGVPEDSDSQAEKTAEPEPEGRINECQLEELVKTHSQIDDARYQASIEYVRRVLRSDDPGEFFNDWLFSCFPGKEGRRIQRRKRERLPPRNAKQKRAAEFRVLQELWRKDRSRLATVILDKMPPTAKEPPIGDIEKVYTTRFERPSPEDQHEFTSKPIEEPMEMVRFITVEEVLKNLKAMKSNNAPGLDSNITMKRLRSLPLPCLQLVFNCWLAIGKAPQSMKQCRSKLLPKGAEGLDDVNNWRPLTIGSLLIRLYTRILAMRLQSKVQLHPRQKAFQPLDGCGENIAIVSSLLQDAHERKKELNIIFLDIAKAFDCVSHHSIQRALNRFGLPRAFRRVIEDLYDGATTVFQTSEGDSKTLGISSGVKQGCPLSPVLFNMVMDELIADAPSTEWGYELHDESVGLLAFADDIALVSHSRAMMSHALDYAAGFFEKRNLQLNARKCIGLSIKKAPRRKVMRIEMGSIWSLRNGSDNIPIKMLSPADMARYLGALFSPSGKQTIDLATMKGWITSIEKSRLKPHQKLVMLRTYLLPRVLHHLTIGEPNATTLRRVEREARNSVKRFLKLPVATATPFFHISTKEGGLELPPLLETIAKRKLKWEIRLQKSKDSLIRAVADSPKFRKQFDKARAWIGVPVINRPSDINRRIRELNNGRFERFTSELAVQSRCHRALASNPLRNDWLTGHNPGLYASQFIDALKLVTSQLPTREALNRGNPQADKRCRGCGFSVENQKHVISNCPLVQQERHLRHNRVAQLFARYAKEKGWNIIAEPRIRNPSGEIMRPDIVLRRDDNVAIVDIQIPYEDGGREQLAERYRQKCSKYRQLSTHIQHVLGVTNHTIGAIIVGACGTWCELNNPILDYIGVNTTAIKKNLSIEALRGTLKIFGQFKNRVFRNERVHPSQRPSSGPPVP

SEQ ID NO: 2477 - protein, 1056 aa, synthetic construct
  source 1..1056: note = MG140-8_D451A
MYPTSAEVPQPCPVCLSSLIDPKQIRDHFRKKHHGVLMHWTCRKCGRFWPNNKSAASHYRYCIKSLPSLEGPSKSHKCIECGGSFSTLAGLQLHRKRKHPEAYNESLPRPTGKNRPWGDDELKRLAAVELDSGGTKHINIKCQKHLPHRTIEAIASIRKTDRYRIILREIRSSRSISRETREEATTSTPDSSNVLERLTSRIAELKSGDYSPSVEAILAYTERCLEDRNASSGLSLLPSEMYMPKPTSASKINRGMRTPFRPQNRTQRRRQHYQQVQLLYKRDRKQAAGVILDGSPLHVVQPDVEKVDEIFRSRFSRPSPPDDAEFISSPAGVLNMDYITAGEIQQCRDSMKKNNAPGPDRNITMDVLLALELPVLELLFNTWLALKQVPAAFKTARTILIPKSGDTSDPNNWRPITICSLISRLYAKLLASRLSKCANLSERQKAFRPVAGCGENTAILSAVIAQARKTKSQLHVVFLDLAKAFDTIPHTSIVRALKRKALPGHFIDVVENLYTEATTSISVGGKNTSSMPLTSGVKQGCPLSPILFNLVLDELITLIGDDNGVDLNDKKIAILAFADDLVLLSPTTDGMETNLKLCEGFFDKRSMKLNARKSVSLSIVRAHKRKTMLTDERPKWKVHGEFLPTIKHTEEIKYLGVRYSAAGRSIAKFPKLDQWLQRLKKAPLKPQQRIQMVRSTITSRLIHTLRLSRVHAKLLKDLDRKIRSFVKSVLHLPSGTSTDFFYIPVLKGGLGLQEFMTLIPAAKLKLINSMKKSSDQAVIAAMEVDHWLREERWCRKVTLNQGNKNDAERRRLARYINSPRGKSQVGFANLPGQCRWLEGGAKLTGHEYIVGCHLMSNTLPVRTRTFHGGRDRVVTCRYCPGVLETPSHALQSCPVVRNAVTKRHDLILTKLQHFLTPNYDSVIREPWFNGREGRMNPDLVLKQGKMVYVVDLTIPYDSSPEFIDSQAQRKVAKYDTLKPLLQQKFQAERVEVIGLALGARGMYTSAGIQTCLKLGLSDRQRRYMGMMALRLTCAVWGIFRSQPSGLFNKVPDTGTT

SEQ ID NO: 2478 - protein, 1056 aa, synthetic construct
  source 1..1056: note = MG140-8_I722A
MYPTSAEVPQPCPVCLSSLIDPKQIRDHFRKKHHGVLMHWTCRKCGRFWPNNKSAASHYRYCIKSLPSLEGPSKSHKCIECGGSFSTLAGLQLHRKRKHPEAYNESLPRPTGKNRPWGDDELKRLAAVELDSGGTKHINIKCQKHLPHRTIEAIASIRKTDRYRIILREIRSSRSISRETREEATTSTPDSSNVLERLTSRIAELKSGDYSPSVEAILAYTERCLEDRNASSGLSLLPSEMYMPKPTSASKINRGMRTPFRPQNRTQRRRQHYQQVQLLYKRDRKQAAGVILDGSPLHVVQPDVEKVDEIFRSRFSRPSPPDDAEFISSPAGVLNMDYITAGEIQQCRDSMKKNNAPGPDRNITMDVLLALELPVLELLFNTWLALKQVPAAFKTARTILIPKSGDTSDPNNWRPITICSLISRLYAKLLASRLSKCANLSERQKAFRPVDGCGENTAILSAVIAQARKTKSQLHVVFLDLAKAFDTIPHTSIVRALKRKALPGHFIDVVENLYTEATTSISVGGKNTSSMPLTSGVKQGCPLSPILFNLVLDELITLIGDDNGVDLNDKKIAILAFADDLVLLSPTTDGMETNLKLCEGFFDKRSMKLNARKSVSLSIVRAHKRKTMLTDERPKWKVHGEFLPTIKHTEEIKYLGVRYSAAGRSIAKFPKLDQWLQRLKKAPLKPQQRIQMVRSTITSRLIHTLRLSRVHAKLLKDLDRKARSFVKSVLHLPSGTSTDFFYIPVLKGGLGLQEFMTLIPAAKLKLINSMKKSSDQAVIAAMEVDHWLREERWCRKVTLNQGNKNDAERRRLARYINSPRGKSQVGFANLPGQCRWLEGGAKLTGHEYIVGCHLMSNTLPVRTRTFHGGRDRVVTCRYCPGVLETPSHALQSCPVVRNAVTKRHDLILTKLQHFLTPNYDSVIREPWFNGREGRMNPDLVLKQGKMVYVVDLTIPYDSSPEFIDSQAQRKVAKYDTLKPLLQQKFQAERVEVIGLALGARGMYTSAGIQTCLKLGLSDRQRRYMGMMALRLTCAVWGIFRSQPSGLFNKVPDTGTT

SEQ ID NO: 2479 - protein, 1056 aa, synthetic construct
  source 1..1056: note = MG140-8_L655A
MYPTSAEVPQPCPVCLSSLIDPKQIRDHFRKKHHGVLMHWTCRKCGRFWPNNKSAASHYRYCIKSLPSLEGPSKSHKCIECGGSFSTLAGLQLHRKRKHPEAYNESLPRPTGKNRPWGDDELKRLAAVELDSGGTKHINIKCQKHLPHRTIEAIASIRKTDRYRIILREIRSSRSISRETREEATTSTPDSSNVLERLTSRIAELKSGDYSPSVEAILAYTERCLEDRNASSGLSLLPSEMYMPKPTSASKINRGMRTPFRPQNRTQRRRQHYQQVQLLYKRDRKQAAGVILDGSPLHVVQPDVEKVDEIFRSRFSRPSPPDDAEFISSPAGVLNMDYITAGEIQQCRDSMKKNNAPGPDRNITMDVLLALELPVLELLFNTWLALKQVPAAFKTARTILIPKSGDTSDPNNWRPITICSLISRLYAKLLASRLSKCANLSERQKAFRPVDGCGENTAILSAVIAQARKTKSQLHVVFLDLAKAFDTIPHTSIVRALKRKALPGHFIDVVENLYTEATTSISVGGKNTSSMPLTSGVKQGCPLSPILFNLVLDELITLIGDDNGVDLNDKKIAILAFADDLVLLSPTTDGMETNLKLCEGFFDKRSMKLNARKSVSLSIVRAHKRKTMLTDERPKWKVHGEFLPTIKHTEEIKYAGVRYSAAGRSIAKFPKLDQWLQRLKKAPLKPQQRIQMVRSTITSRLIHTLRLSRVHAKLLKDLDRKIRSFVKSVLHLPSGTSTDFFYIPVLKGGLGLQEFMTLIPAAKLKLINSMKKSSDQAVIAAMEVDHWLREERWCRKVTLNQGNKNDAERRRLARYINSPRGKSQVGFANLPGQCRWLEGGAKLTGHEYIVGCHLMSNTLPVRTRTFHGGRDRVVTCRYCPGVLETPSHALQSCPVVRNAVTKRHDLILTKLQHFLTPNYDSVIREPWFNGREGRMNPDLVLKQGKMVYVVDLTIPYDSSPEFIDSQAQRKVAKYDTLKPLLQQKFQAERVEVIGLALGARGMYTSAGIQTCLKLGLSDRQRRYMGMMALRLTCAVWGIFRSQPSGLFNKVPDTGTT

SEQ ID NO: 2480 - protein, 1056 aa, synthetic construct
  source 1..1056: note = MG140-8_L705A
MYPTSAEVPQPCPVCLSSLIDPKQIRDHFRKKHHGVLMHWTCRKCGRFWPNNKSAASHYRYCIKSLPSLEGPSKSHKCIECGGSFSTLAGLQLHRKRKHPEAYNESLPRPTGKNRPWGDDELKRLAAVELDSGGTKHINIKCQKHLPHRTIEAIASIRKTDRYRIILREIRSSRSISRETREEATTSTPDSSNVLERLTSRIAELKSGDYSPSVEAILAYTERCLEDRNASSGLSLLPSEMYMPKPTSASKINRGMRTPFRPQNRTQRRRQHYQQVQLLYKRDRKQAAGVILDGSPLHVVQPDVEKVDEIFRSRFSRPSPPDDAEFISSPAGVLNMDYITAGEIQQCRDSMKKNNAPGPDRNITMDVLLALELPVLELLFNTWLALKQVPAAFKTARTILIPKSGDTSDPNNWRPITICSLISRLYAKLLASRLSKCANLSERQKAFRPVDGCGENTAILSAVIAQARKTKSQLHVVFLDLAKAFDTIPHTSIVRALKRKALPGHFIDVVENLYTEATTSISVGGKNTSSMPLTSGVKQGCPLSPILFNLVLDELITLIGDDNGVDLNDKKIAILAFADDLVLLSPTTDGMETNLKLCEGFFDKRSMKLNARKSVSLSIVRAHKRKTMLTDERPKWKVHGEFLPTIKHTEEIKYLGVRYSAAGRSIAKFPKLDQWLQRLKKAPLKPQQRIQMVRSTITSRLIHTARLSRVHAKLLKDLDRKIRSFVKSVLHLPSGTSTDFFYIPVLKGGLGLQEFMTLIPAAKLKLINSMKKSSDQAVIAAMEVDHWLREERWCRKVTLNQGNKNDAERRRLARYINSPRGKSQVGFANLPGQCRWLEGGAKLTGHEYIVGCHLMSNTLPVRTRTFHGGRDRVVTCRYCPGVLETPSHALQSCPVVRNAVTKRHDLILTKLQHFLTPNYDSVIREPWFNGREGRMNPDLVLKQGKMVYVVDLTIPYDSSPEFIDSQAQRKVAKYDTLKPLLQQKFQAERVEVIGLALGARGMYTSAGIQTCLKLGLSDRQRRYMGMMALRLTCAVWGIFRSQPSGLFNKVPDTGTT

SEQ ID NO: 2481 - protein, 1246 aa, synthetic construct
  source 1..1246: note = MG140-88_W540A
MGDRVKTAQDAGSKTSSCQRDAPPANAQFVCVSCNSRFDRKSSLSLHSKSCGNTRTKCNYCTVSLTTYKLIRQHERRHHNAEYMRDLEAEKPTPDSAYFAKLAAMEAAAKGGVVSIAAMVTATGLTTHQIRTKRSKPVYQKYLEMAKRDQVAKSKLLFGATSSATSPSTSTSVTNATTTASPPSRAVTVSRQHSADGTAPRKNASSSYTRGPCPKASTSASPPGPPPPSVARIETQTDDGKRRRLSSPTVPAGVPTSERKKKRLQGSPLRPTTSRLLPNTTSASATGLPADTPQENASPGPDPPPAAPNKPADRPPAPLGDESALQQPEAPITSCKRLRSPSLSPAMPLAPALRRTSATVTPLRTRLPHAPPPRLNRDSAMASEFRLALEAVLEAEEPCPGIHRLVTSALSDNNSMFQARLDEFWAATWPTTTSRERRRPPRPSGYGSVHHGKGTRAAEYKKAQELFGKDKRGLANTILEGRPILTPPEVPSIQQVEDVFAAIWEADVADGPIAATSPHIPVPSMPPIFEADVQLAREHAMKSAPGPDGITVAQVCRMNPRVLATVFNILLLRAAVPSSWRVLRTVLIHKGGSRTDPNNWRPLTIASTLQRLFHRVLLRHLTSHTTLHPSQRGFRSVDGTFANAVILDAYIKSRTGQGKAWNIVGIDLSKAFDSVSHNAISKALALAGVDERLATYIITSLTGCATQLDLGGKKSRPINIQRGVKQGDPLSPLLFNLVLDPILQHISTCFKGGTIPGGDKVPVIAFADDLFLLADDDLEIPLMLHMLEEYLTQQGLRINARKCVSISAATIAGKSVVRSKSHYRISESLIPCVGNMNSFKYMGHQFSEKGMMPYNLGNLRTWLERVLKAPLKPHQKMCLLKDHVIPKVLHGLSSPATTGDKLREADRLIRRFVKRALHLQIHTANHLIHARIRDGGLGVLELRKTIPEVSLRRCRGIANATSDPVLASFTSSDHFLKLVNKLEKLAGTVPSTEANRSLIITSPSSSGLEAAADDPASRQWLQSLPQGWTGRDFVRAVHLRTGNLPTRDHHSNPPELRKCRDGCEENESLRHILQLCPRVQAHRIRRHNEIASKVANAMRRKWTVEWEPHVKHEDRKLYKPDMAIHLPDQLVIVDVQVAWEWKENSLAVAWDAKRNKYTTPHFMEAAARRWPGRRVTTLPVILGARGIWPSCNRTTVNTLNLSSALRRSCVESCLKWGSTIHKQFMASVFSQSTRSRPQGLSSRDAG

SEQ ID NO: 2482 - protein, 1035 aa, synthetic construct
  source 1..1035: note = MG140-74_D920A
MFACGQCERTFGNKGALGNHCKWKHAQTRLPERTNGGEFPCPDCDNAYGSSGGLNVHRRARHPDVYHAARQPAARVKARWSYEELVLVARAELEIRGTNPPQGVVRVLHSRFPDRTFEAIKCLRNKNPRYKEVLAALEVEEVDEGLPTVTPSEQTHAFAQADGLWRDQLRMAINIEHLGVDDLDWVADGCPAEDIRKKLDELFASWVGHLVRGERAPARSHQPAAGVTNPSRELDPRRRRRAQYSAIQHLYGRKPSAAAHKVLDGSWECGDPVPTPTLEDFRMAWQPIFETPSIKDNRRPTCVGQVRWEIVSPVTPGELEKVLTEGASSAPGPDGVKLKDVIGLGIGELCSHFNLWLLCGSQPSAMCVGRTIYIPKGSESNDALKYRPITIASHILRVFHKIMARRFDAFLPLKYTQKGFRSGDGIAQHVLSLQAIIDGAKRQRKPVNLVFLDVRKAFDSVSHDTIVLAMRRLGCPDPFLSYIRDLYSRSSTVIEHNGERSAPIFTRRGVKQGDPLSPFMFNAVIDWAFSSLDDHVGFSFGHVRVNNLGYADDVALLSDTRAGLRSQLGKFESHLAKGGLTISAGTEGKSSSLSIVVDGKAKRWVVDQTPFLATNEGIIPSLSASGEYRYLGIMLGSGGAKVRSSLREELLQGLQNITRAPLKPYQRMRILRNFLLPKYLHELVLAPVADGWLNWLDTAIRANVRQWLKLPQDTPVAFIHAGTGDGGLSVPSLRYSVPVMRRKRLEAVHSATDPLSTALTASPFFQKELSGLSRKTLGGRLVTDKQSLAQAWAGCLYTKVDGRGLSEARSCAEGSRWVSNPPRNQSGANYIGAIKARGGLLYSKVRSARGDSGRDVRCDSCMRPETAQHIIQVCPRTSGPRMRRHDRVVQFVSAAAERAGYKVLVEPRIVGRTLGVRKPALVLWNESRAYVADVTITSDQVGGVKAHRDKVAYYDQPEIREWVERFTGLSHISFSAVAANWRGVLSPLSADFLKSVLKLSNWDISLLGLRICEETYHIHRYFGRSTYRVRGRGPS

SEQ ID NO: 2483 - protein, 852 aa, synthetic construct
  source 1..852: note = MG140-74_C5_Trim
MFACGQCERTFGNKGALGNHCKWKHAQTRLPERTNGGEFPCPDCDNAYGSSGGLNVHRRARHPDVYHAARQPAARVKARWSYEELVLVARAELEIRGTNPPQGVVRVLHSRFPDRTFEAIKCLRNKNPRYKEVLAALEVEEVDEGLPTVTPSEQTHAFAQADGLWRDQLRMAINIEHLGVDDLDWVADGCPAEDIRKKLDELFASWVGHLVRGERAPARSHQPAAGVTNPSRELDPRRRRRAQYSAIQHLYGRKPSAAAHKVLDGSWECGDPVPTPTLEDFRMAWQPIFETPSIKDNRRPTCVGQVRWEIVSPVTPGELEKVLTEGASSAPGPDGVKLKDVIGLGIGELCSHFNLWLLCGSQPSAMCVGRTIYIPKGSESNDALKYRPITIASHILRVFHKIMARRFDAFLPLKYTQKGFRSGDGIAQHVLSLQAIIDGAKRQRKPVNLVFLDVRKAFDSVSHDTIVLAMRRLGCPDPFLSYIRDLYSRSSTVIEHNGERSAPIFTRRGVKQGDPLSPFMFNAVIDWAFSSLDDHVGFSFGHVRVNNLGYADDVALLSDTRAGLRSQLGKFESHLAKGGLTISAGTEGKSSSLSIVVDGKAKRWVVDQTPFLATNEGIIPSLSASGEYRYLGIMLGSGGAKVRSSLREELLQGLQNITRAPLKPYQRMRILRNFLLPKYLHELVLAPVADGWLNWLDTAIRANVRQWLKLPQDTPVAFIHAGTGDGGLSVPSLRYSVPVMRRKRLEAVHSATDPLSTALTASPFFQKELSGLSRKTLGGRLVTDKQSLAQAWAGCLYTKVDGRGLSEARSCAEGSRWVSNPPRNQSGANYIGAIKARGGLLYSKVRSARGDS

SEQ ID NO: 2484 - protein, 1052 aa, synthetic construct
  source 1..1052: note = MG140-88_C5_Trim
MGDRVKTAQDAGSKTSSCQRDAPPANAQFVCVSCNSRFDRKSSLSLHSKSCGNTRTKCNYCTVSLTTYKLIRQHERRHHNAEYMRDLEAEKPTPDSAYFAKLAAMEAAAKGGVVSIAAMVTATGLTTHQIRTKRSKPVYQKYLEMAKRDQVAKSKLLFGATSSATSPSTSTSVTNATTTASPPSRAVTVSRQHSADGTAPRKNASSSYTRGPCPKASTSASPPGPPPPSVARIETQTDDGKRRRLSSPTVPAGVPTSERKKKRLQGSPLRPTTSRLLPNTTSASATGLPADTPQENASPGPDPPPAAPNKPADRPPAPLGDESALQQPEAPITSCKRLRSPSLSPAMPLAPALRRTSATVTPLRTRLPHAPPPRLNRDSAMASEFRLALEAVLEAEEPCPGIHRLVTSALSDNNSMFQARLDEFWAATWPTTTSRERRRPPRPSGYGSVHHGKGTRAAEYKKAQELFGKDKRGLANTILEGRPILTPPEVPSIQQVEDVFAAIWEADVADGPIAATSPHIPVPSMPPIFEADVQLAREHWMKSAPGPDGITVAQVCRMNPRVLATVFNILLLRAAVPSSWRVLRTVLIHKGGSRTDPNNWRPLTIASTLQRLFHRVLLRHLTSHTTLHPSQRGFRSVDGTFANAVILDAYIKSRTGQGKAWNIVGIDLSKAFDSVSHNAISKALALAGVDERLATYIITSLTGCATQLDLGGKKSRPINIQRGVKQGDPLSPLLFNLVLDPILQHISTCFKGGTIPGGDKVPVIAFADDLFLLADDDLEIPLMLHMLEEYLTQQGLRINARKCVSISAATIAGKSVVRSKSHYRISESLIPCVGNMNSFKYMGHQFSEKGMMPYNLGNLRTWLERVLKAPLKPHQKMCLLKDHVIPKVLHGLSSPATTGDKLREADRLIRRFVKRALHLQIHTANHLIHARIRDGGLGVLELRKTIPEVSLRRCRGIANATSDPVLASFTSSDHFLKLVNKLEKLAGTVPSTEANRSLIITSPSSSGLEAAADDPASRQWLQSLPQGWTGRDFVRAVHLRTGNLPTRDHHSN

SEQ ID NO: 2485 - protein, 1246 aa, synthetic construct
  source 1..1246: note = MG140-88_D1121A
MGDRVKTAQDAGSKTSSCQRDAPPANAQFVCVSCNSRFDRKSSLSLHSKSCGNTRTKCNYCTVSLTTYKLIRQHERRHHNAEYMRDLEAEKPTPDSAYFAKLAAMEAAAKGGVVSIAAMVTATGLTTHQIRTKRSKPVYQKYLEMAKRDQVAKSKLLFGATSSATSPSTSTSVTNATTTASPPSRAVTVSRQHSADGTAPRKNASSSYTRGPCPKASTSASPPGPPPPSVARIETQTDDGKRRRLSSPTVPAGVPTSERKKKRLQGSPLRPTTSRLLPNTTSASATGLPADTPQENASPGPDPPPAAPNKPADRPPAPLGDESALQQPEAPITSCKRLRSPSLSPAMPLAPALRRTSATVTPLRTRLPHAPPPRLNRDSAMASEFRLALEAVLEAEEPCPGIHRLVTSALSDNNSMFQARLDEFWAATWPTTTSRERRRPPRPSGYGSVHHGKGTRAAEYKKAQELFGKDKRGLANTILEGRPILTPPEVPSIQQVEDVFAAIWEADVADGPIAATSPHIPVPSMPPIFEADVQLAREHWMKSAPGPDGITVAQVCRMNPRVLATVFNILLLRAAVPSSWRVLRTVLIHKGGSRTDPNNWRPLTIASTLQRLFHRVLLRHLTSHTTLHPSQRGFRSVDGTFANAVILDAYIKSRTGQGKAWNIVGIDLSKAFDSVSHNAISKALALAGVDERLATYIITSLTGCATQLDLGGKKSRPINIQRGVKQGDPLSPLLFNLVLDPILQHISTCFKGGTIPGGDKVPVIAFADDLFLLADDDLEIPLMLHMLEEYLTQQGLRINARKCVSISAATIAGKSVVRSKSHYRISESLIPCVGNMNSFKYMGHQFSEKGMMPYNLGNLRTWLERVLKAPLKPHQKMCLLKDHVIPKVLHGLSSPATTGDKLREADRLIRRFVKRALHLQIHTANHLIHARIRDGGLGVLELRKTIPEVSLRRCRGIANATSDPVLASFTSSDHFLKLVNKLEKLAGTVPSTEANRSLIITSPSSSGLEAAADDPASRQWLQSLPQGWTGRDFVRAVHLRTGNLPTRDHHSNPPELRKCRDGCEENESLRHILQLCPRVQAHRIRRHNEIASKVANAMRRKWTVEWEPHVKHEDRKLYKPAMAIHLPDQLVIVDVQVAWEWKENSLAVAWDAKRNKYTTPHFMEAAARRWPGRRVTTLPVILGARGIWPSCNRTTVNTLNLSSALRRSCVESCLKWGSTIHKQFMASVFSQSTRSRPQGLSSRDAG

SEQ ID NO: 2486 - protein, 813 aa, synthetic construct
  source 1..813: note = MG140-8_N1_Trim
PKPTSASKINRGMRTPFRPQNRTQRRRQHYQQVQLLYKRDRKQAAGVILDGSPLHVVQPDVEKVDEIFRSRFSRPSPPDDAEFISSPAGVLNMDYITAGEIQQCRDSMKKNNAPGPDRNITMDVLLALELPVLELLFNTWLALKQVPAAFKTARTILIPKSGDTSDPNNWRPITICSLISRLYAKLLASRLSKCANLSERQKAFRPVDGCGENTAILSAVIAQARKTKSQLHVVFLDLAKAFDTIPHTSIVRALKRKALPGHFIDVVENLYTEATTSISVGGKNTSSMPLTSGVKQGCPLSPILFNLVLDELITLIGDDNGVDLNDKKIAILAFADDLVLLSPTTDGMETNLKLCEGFFDKRSMKLNARKSVSLSIVRAHKRKTMLTDERPKWKVHGEFLPTIKHTEEIKYLGVRYSAAGRSIAKFPKLDQWLQRLKKAPLKPQQRIQMVRSTITSRLIHTLRLSRVHAKLLKDLDRKIRSFVKSVLHLPSGTSTDFFYIPVLKGGLGLQEFMTLIPAAKLKLINSMKKSSDQAVIAAMEVDHWLREERWCRKVTLNQGNKNDAERRRLARYINSPRGKSQVGFANLPGQCRWLEGGAKLTGHEYIVGCHLMSNTLPVRTRTFHGGRDRVVTCRYCPGVLETPSHALQSCPVVRNAVTKRHDLILTKLQHFLTPNYDSVIREPWFNGREGRMNPDLVLKQGKMVYVVDLTIPYDSSPEFIDSQAQRKVAKYDTLKPLLQQKFQAERVEVIGLALGARGMYTSAGIQTCLKLGLSDRQRRYMGMMALRLTCAVWGIFRSQPSGLFNKVPDTGTT

SEQ ID NO: 2487 - protein, 799 aa, synthetic construct
  source 1..799: note = MG140-8_N2_Trim
TPFRPQNRTQRRRQHYQQVQLLYKRDRKQAAGVILDGSPLHVVQPDVEKVDEIFRSRFSRPSPPDDAEFISSPAGVLNMDYITAGEIQQCRDSMKKNNAPGPDRNITMDVLLALELPVLELLFNTWLALKQVPAAFKTARTILIPKSGDTSDPNNWRPITICSLISRLYAKLLASRLSKCANLSERQKAFRPVDGCGENTAILSAVIAQARKTKSQLHVVFLDLAKAFDTIPHTSIVRALKRKALPGHFIDVVENLYTEATTSISVGGKNTSSMPLTSGVKQGCPLSPILFNLVLDELITLIGDDNGVDLNDKKIAILAFADDLVLLSPTTDGMETNLKLCEGFFDKRSMKLNARKSVSLSIVRAHKRKTMLTDERPKWKVHGEFLPTIKHTEEIKYLGVRYSAAGRSIAKFPKLDQWLQRLKKAPLKPQQRIQMVRSTITSRLIHTLRLSRVHAKLLKDLDRKIRSFVKSVLHLPSGTSTDFFYIPVLKGGLGLQEFMTLIPAAKLKLINSMKKSSDQAVIAAMEVDHWLREERWCRKVTLNQGNKNDAERRRLARYINSPRGKSQVGFANLPGQCRWLEGGAKLTGHEYIVGCHLMSNTLPVRTRTFHGGRDRVVTCRYCPGVLETPSHALQSCPVVRNAVTKRHDLILTKLQHFLTPNYDSVIREPWFNGREGRMNPDLVLKQGKMVYVVDLTIPYDSSPEFIDSQAQRKVAKYDTLKPLLQQKFQAERVEVIGLALGARGMYTSAGIQTCLKLGLSDRQRRYMGMMALRLTCAVWGIFRSQPSGLFNKVPDTGTT

SEQ ID NO: 2488 - protein, 795 aa, synthetic construct
  source 1..795: note = MG140-8_N3_Trim
PQNRTQRRRQHYQQVQLLYKRDRKQAAGVILDGSPLHVVQPDVEKVDEIFRSRFSRPSPPDDAEFISSPAGVLNMDYITAGEIQQCRDSMKKNNAPGPDRNITMDVLLALELPVLELLFNTWLALKQVPAAFKTARTILIPKSGDTSDPNNWRPITICSLISRLYAKLLASRLSKCANLSERQKAFRPVDGCGENTAILSAVIAQARKTKSQLHVVFLDLAKAFDTIPHTSIVRALKRKALPGHFIDVVENLYTEATTSISVGGKNTSSMPLTSGVKQGCPLSPILFNLVLDELITLIGDDNGVDLNDKKIAILAFADDLVLLSPTTDGMETNLKLCEGFFDKRSMKLNARKSVSLSIVRAHKRKTMLTDERPKWKVHGEFLPTIKHTEEIKYLGVRYSAAGRSIAKFPKLDQWLQRLKKAPLKPQQRIQMVRSTITSRLIHTLRLSRVHAKLLKDLDRKIRSFVKSVLHLPSGTSTDFFYIPVLKGGLGLQEFMTLIPAAKLKLINSMKKSSDQAVIAAMEVDHWLREERWCRKVTLNQGNKNDAERRRLARYINSPRGKSQVGFANLPGQCRWLEGGAKLTGHEYIVGCHLMSNTLPVRTRTFHGGRDRVVTCRYCPGVLETPSHALQSCPVVRNAVTKRHDLILTKLQHFLTPNYDSVIREPWFNGREGRMNPDLVLKQGKMVYVVDLTIPYDSSPEFIDSQAQRKVAKYDTLKPLLQQKFQAERVEVIGLALGARGMYTSAGIQTCLKLGLSDRQRRYMGMMALRLTCAVWGIFRSQPSGLFNKVPDTGTT

SEQ ID NO: 2489 - protein, 753 aa, synthetic construct
  source 1..753: note = MG140-8_C4_Trim
MYPTSAEVPQPCPVCLSSLIDPKQIRDHFRKKHHGVLMHWTCRKCGRFWPNNKSAASHYRYCIKSLPSLEGPSKSHKCIECGGSFSTLAGLQLHRKRKHPEAYNESLPRPTGKNRPWGDDELKRLAAVELDSGGTKHINIKCQKHLPHRTIEAIASIRKTDRYRIILREIRSSRSISRETREEATTSTPDSSNVLERLTSRIAELKSGDYSPSVEAILAYTERCLEDRNASSGLSLLPSEMYMPKPTSASKINRGMRTPFRPQNRTQRRRQHYQQVQLLYKRDRKQAAGVILDGSPLHVVQPDVEKVDEIFRSRFSRPSPPDDAEFISSPAGVLNMDYITAGEIQQCRDSMKKNNAPGPDRNITMDVLLALELPVLELLFNTWLALKQVPAAFKTARTILIPKSGDTSDPNNWRPITICSLISRLYAKLLASRLSKCANLSERQKAFRPVDGCGENTAILSAVIAQARKTKSQLHVVFLDLAKAFDTIPHTSIVRALKRKALPGHFIDVVENLYTEATTSISVGGKNTSSMPLTSGVKQGCPLSPILFNLVLDELITLIGDDNGVDLNDKKIAILAFADDLVLLSPTTDGMETNLKLCEGFFDKRSMKLNARKSVSLSIVRAHKRKTMLTDERPKWKVHGEFLPTIKHTEEIKYLGVRYSAAGRSIAKFPKLDQWLQRLKKAPLKPQQRIQMVRSTITSRLIHTLRLSRVHAKLLKDLDRKIRSFVKSVLHLPSGTSTDFFYIPVLKGGLGLQ

SEQ ID NO: 2490 - protein, 869 aa, synthetic construct
  source 1..869: note = MG140-8_C5_Trim
MYPTSAEVPQPCPVCLSSLIDPKQIRDHFRKKHHGVLMHWTCRKCGRFWPNNKSAASHYRYCIKSLPSLEGPSKSHKCIECGGSFSTLAGLQLHRKRKHPEAYNESLPRPTGKNRPWGDDELKRLAAVELDSGGTKHINIKCQKHLPHRTIEAIASIRKTDRYRIILREIRSSRSISRETREEATTSTPDSSNVLERLTSRIAELKSGDYSPSVEAILAYTERCLEDRNASSGLSLLPSEMYMPKPTSASKINRGMRTPFRPQNRTQRRRQHYQQVQLLYKRDRKQAAGVILDGSPLHVVQPDVEKVDEIFRSRFSRPSPPDDAEFISSPAGVLNMDYITAGEIQQCRDSMKKNNAPGPDRNITMDVLLALELPVLELLFNTWLALKQVPAAFKTARTILIPKSGDTSDPNNWRPITICSLISRLYAKLLASRLSKCANLSERQKAFRPVDGCGENTAILSAVIAQARKTKSQLHVVFLDLAKAFDTIPHTSIVRALKRKALPGHFIDVVENLYTEATTSISVGGKNTSSMPLTSGVKQGCPLSPILFNLVLDELITLIGDDNGVDLNDKKIAILAFADDLVLLSPTTDGMETNLKLCEGFFDKRSMKLNARKSVSLSIVRAHKRKTMLTDERPKWKVHGEFLPTIKHTEEIKYLGVRYSAAGRSIAKFPKLDQWLQRLKKAPLKPQQRIQMVRSTITSRLIHTLRLSRVHAKLLKDLDRKIRSFVKSVLHLPSGTSTDFFYIPVLKGGLGLQEFMTLIPAAKLKLINSMKKSSDQAVIAAMEVDHWLREERWCRKVTLNQGNKNDAERRRLARYINSPRGKSQVGFANLPGQCRWLEGGAKLTGHEYIVGCHLMSNTLPVRTRTFHGG

SEQ ID NO: 2491 - protein, 842 aa, synthetic construct
  source 1..842: note = MG140-3_N1_Trim
FPGKEGRRIQRRKRERLPPRNAKQKRAAEFRVLQELWRKDRSRLATVILDKMPPTAKEPPIGDIEKVYTTRFERPSPEDQHEFTSKPIEEPMEMVRFITVEEVLKNLKAMKSNNAPGLDSNITMKRLRSLPLPCLQLVFNCWLAIGKAPQSMKQCRSKLLPKGAEGLDDVNNWRPLTIGSLLIRLYTRILAMRLQSKVQLHPRQKAFQPLDGCGENIAIVSSLLQDAHERKKELNIIFLDIAKAFDCVSHHSIQRALNRFGLPRAFRRVIEDLYDGATTVFQTSEGDSKTLGISSGVKQGCPLSPVLFNMVMDELIADAPSTEWGYELHDESVGLLAFADDIALVSHSRAMMSHALDYAAGFFEKRNLQLNARKCIGLSIKKAPRRKVMRIEMGSIWSLRNGSDNIPIKMLSPADMARYLGALFSPSGKQTIDLATMKGWITSIEKSRLKPHQKLVMLRTYLLPRVLHHLTIGEPNATTLRRVERELRNSVKRFLKLPVATATPFFHISTKEGGLELPPLLETIAKRKLKWEIRLQKSKDSLIRAVADSPKFRKQFDKARAWIGVPVINRPSDINRRIRELNNGRFERFTSELAVQSRCHRALASNPLRNDWLTGHNPGLYASQFIDALKLVTSQLPTREALNRGNPQADKRCRGCGFSVENQKHVISNCPLVQQERHLRHNRVAQLFARYAKEKGWNIIAEPRIRNPSGEIMRPDIVLRRDDNVAIVDIQIPYEDGGREQLAERYRQKCSKYRQLSTHIQHVLGVTNHTIGAIIVGACGTWCELNNPILDYIGVNTTAIKKNLSIEALRGTLKIFGQFKNRVFRNERVHPSQRPSSGPPVP

SEQ ID NO: 2492 - protein, 829 aa, synthetic construct
  source 1..829: note = MG140-3_N2_Trim
RERLPPRNAKQKRAAEFRVLQELWRKDRSRLATVILDKMPPTAKEPPIGDIEKVYTTRFERPSPEDQHEFTSKPIEEPMEMVRFITVEEVLKNLKAMKSNNAPGLDSNITMKRLRSLPLPCLQLVFNCWLAIGKAPQSMKQCRSKLLPKGAEGLDDVNNWRPLTIGSLLIRLYTRILAMRLQSKVQLHPRQKAFQPLDGCGENIAIVSSLLQDAHERKKELNIIFLDIAKAFDCVSHHSIQRALNRFGLPRAFRRVIEDLYDGATTVFQTSEGDSKTLGISSGVKQGCPLSPVLFNMVMDELIADAPSTEWGYELHDESVGLLAFADDIALVSHSRAMMSHALDYAAGFFEKRNLQLNARKCIGLSIKKAPRRKVMRIEMGSIWSLRNGSDNIPIKMLSPADMARYLGALFSPSGKQTIDLATMKGWITSIEKSRLKPHQKLVMLRTYLLPRVLHHLTIGEPNATTLRRVERELRNSVKRFLKLPVATATPFFHISTKEGGLELPPLLETIAKRKLKWEIRLQKSKDSLIRAVADSPKFRKQFDKARAWIGVPVINRPSDINRRIRELNNGRFERFTSELAVQSRCHRALASNPLRNDWLTGHNPGLYASQFIDALKLVTSQLPTREALNRGNPQADKRCRGCGFSVENQKHVISNCPLVQQERHLRHNRVAQLFARYAKEKGWNIIAEPRIRNPSGEIMRPDIVLRRDDNVAIVDIQIPYEDGGREQLAERYRQKCSKYRQLSTHIQHVLGVTNHTIGAIIVGACGTWCELNNPILDYIGVNTTAIKKNLSIEALRGTLKIFGQFKNRVFRNERVHPSQRPSSGPPVP

SEQ ID NO: 2493 - protein, 824 aa, synthetic construct
  source 1..824: note = MG140-3_N3_Trim
PRNAKQKRAAEFRVLQELWRKDRSRLATVILDKMPPTAKEPPIGDIEKVYTTRFERPSPEDQHEFTSKPIEEPMEMVRFITVEEVLKNLKAMKSNNAPGLDSNITMKRLRSLPLPCLQLVFNCWLAIGKAPQSMKQCRSKLLPKGAEGLDDVNNWRPLTIGSLLIRLYTRILAMRLQSKVQLHPRQKAFQPLDGCGENIAIVSSLLQDAHERKKELNIIFLDIAKAFDCVSHHSIQRALNRFGLPRAFRRVIEDLYDGATTVFQTSEGDSKTLGISSGVKQGCPLSPVLFNMVMDELIADAPSTEWGYELHDESVGLLAFADDIALVSHSRAMMSHALDYAAGFFEKRNLQLNARKCIGLSIKKAPRRKVMRIEMGSIWSLRNGSDNIPIKMLSPADMARYLGALFSPSGKQTIDLATMKGWITSIEKSRLKPHQKLVMLRTYLLPRVLHHLTIGEPNATTLRRVERELRNSVKRFLKLPVATATPFFHISTKEGGLELPPLLETIAKRKLKWEIRLQKSKDSLIRAVADSPKFRKQFDKARAWIGVPVINRPSDINRRIRELNNGRFERFTSELAVQSRCHRALASNPLRNDWLTGHNPGLYASQFIDALKLVTSQLPTREALNRGNPQADKRCRGCGFSVENQKHVISNCPLVQQERHLRHNRVAQLFARYAKEKGWNIIAEPRIRNPSGEIMRPDIVLRRDDNVAIVDIQIPYEDGGREQLAERYRQKCSKYRQLSTHIQHVLGVTNHTIGAIIVGACGTWCELNNPILDYIGVNTTAIKKNLSIEALRGTLKIFGQFKNRVFRNERVHPSQRPSSGPPVP

SEQ ID NO: 2494 - protein, 796 aa, synthetic construct
  source 1..796: note = MG140-3_C4_Trim
MSHSTAAASSGAATGPIVIRYPVNTTNGGTTGEQACFFAESSNCGLAFVDNKSFVDHLLRAHKATRDQIQYICSHCHRQFEKIESVRSHHNICKRKEAVAPDLDARLPVECEVDGCSRRFTTTSGMRLHVKKAHPIEYHASIPQSKRNLWSEGEMRMLARMELDNPGLTNARMNELLHSLHPSRSVDVIRHMRGRNTRYREIMEELVLIGVPEDSDSQAEKTAEPEPEGRINECQLEELVKTHSQIDDARYQASIEYVRRVLRSDDPGEFFNDWLFSCFPGKEGRRIQRRKRERLPPRNAKQKRAAEFRVLQELWRKDRSRLATVILDKMPPTAKEPPIGDIEKVYTTRFERPSPEDQHEFTSKPIEEPMEMVRFITVEEVLKNLKAMKSNNAPGLDSNITMKRLRSLPLPCLQLVFNCWLAIGKAPQSMKQCRSKLLPKGAEGLDDVNNWRPLTIGSLLIRLYTRILAMRLQSKVQLHPRQKAFQPLDGCGENIAIVSSLLQDAHERKKELNIIFLDIAKAFDCVSHHSIQRALNRFGLPRAFRRVIEDLYDGATTVFQTSEGDSKTLGISSGVKQGCPLSPVLFNMVMDELIADAPSTEWGYELHDESVGLLAFADDIALVSHSRAMMSHALDYAAGFFEKRNLQLNARKCIGLSIKKAPRRKVMRIEMGSIWSLRNGSDNIPIKMLSPADMARYLGALFSPSGKQTIDLATMKGWITSIEKSRLKPHQKLVMLRTYLLPRVLHHLTIGEPNATTLRRVERELRNSVKRFLKLPVATATPFFHISTKEGGLELP

SEQ ID NO: 2495 - protein, 925 aa, synthetic construct
  source 1..925: note = MG140-3_C5_Trim
MSHSTAAASSGAATGPIVIRYPVNTTNGGTTGEQACFFAESSNCGLAFVDNKSFVDHLLRAHKATRDQIQYICSHCHRQFEKIESVRSHHNICKRKEAVAPDLDARLPVECEVDGCSRRFTTTSGMRLHVKKAHPIEYHASIPQSKRNLWSEGEMRMLARMELDNPGLTNARMNELLHSLHPSRSVDVIRHMRGRNTRYREIMEELVLIGVPEDSDSQAEKTAEPEPEGRINECQLEELVKTHSQIDDARYQASIEYVRRVLRSDDPGEFFNDWLFSCFPGKEGRRIQRRKRERLPPRNAKQKRAAEFRVLQELWRKDRSRLATVILDKMPPTAKEPPIGDIEKVYTTRFERPSPEDQHEFTSKPIEEPMEMVRFITVEEVLKNLKAMKSNNAPGLDSNITMKRLRSLPLPCLQLVFNCWLAIGKAPQSMKQCRSKLLPKGAEGLDDVNNWRPLTIGSLLIRLYTRILAMRLQSKVQLHPRQKAFQPLDGCGENIAIVSSLLQDAHERKKELNIIFLDIAKAFDCVSHHSIQRALNRFGLPRAFRRVIEDLYDGATTVFQTSEGDSKTLGISSGVKQGCPLSPVLFNMVMDELIADAPSTEWGYELHDESVGLLAFADDIALVSHSRAMMSHALDYAAGFFEKRNLQLNARKCIGLSIKKAPRRKVMRIEMGSIWSLRNGSDNIPIKMLSPADMARYLGALFSPSGKQTIDLATMKGWITSIEKSRLKPHQKLVMLRTYLLPRVLHHLTIGEPNATTLRRVERELRNSVKRFLKLPVATATPFFHISTKEGGLELPPLLETIAKRKLKWEIRLQKSKDSLIRAVADSPKFRKQFDKARAWIGVPVINRPSDINRRIRELNNGRFERFTSELAVQSRCHRALASNPLRNDWLTGHNPGLYASQFIDALKLVTSQLPTREALNRGNP

SEQ ID NO: 2496 - protein, 1246 aa, synthetic construct
  source 1..1246: note = MG140-88_D638A
MGDRVKTAQDAGSKTSSCQRDAPPANAQFVCVSCNSRFDRKSSLSLHSKSCGNTRTKCNYCTVSLTTYKLIRQHERRHHNAEYMRDLEAEKPTPDSAYFAKLAAMEAAAKGGVVSIAAMVTATGLTTHQIRTKRSKPVYQKYLEMAKRDQVAKSKLLFGATSSATSPSTSTSVTNATTTASPPSRAVTVSRQHSADGTAPRKNASSSYTRGPCPKASTSASPPGPPPPSVARIETQTDDGKRRRLSSPTVPAGVPTSERKKKRLQGSPLRPTTSRLLPNTTSASATGLPADTPQENASPGPDPPPAAPNKPADRPPAPLGDESALQQPEAPITSCKRLRSPSLSPAMPLAPALRRTSATVTPLRTRLPHAPPPRLNRDSAMASEFRLALEAVLEAEEPCPGIHRLVTSALSDNNSMFQARLDEFWAATWPTTTSRERRRPPRPSGYGSVHHGKGTRAAEYKKAQELFGKDKRGLANTILEGRPILTPPEVPSIQQVEDVFAAIWEADVADGPIAATSPHIPVPSMPPIFEADVQLAREHWMKSAPGPDGITVAQVCRMNPRVLATVFNILLLRAAVPSSWRVLRTVLIHKGGSRTDPNNWRPLTIASTLQRLFHRVLLRHLTSHTTLHPSQRGFRSVAGTFANAVILDAYIKSRTGQGKAWNIVGIDLSKAFDSVSHNAISKALALAGVDERLATYIITSLTGCATQLDLGGKKSRPINIQRGVKQGDPLSPLLFNLVLDPILQHISTCFKGGTIPGGDKVPVIAFADDLFLLADDDLEIPLMLHMLEEYLTQQGLRINARKCVSISAATIAGKSVVRSKSHYRISESLIPCVGNMNSFKYMGHQFSEKGMMPYNLGNLRTWLERVLKAPLKPHQKMCLLKDHVIPKVLHGLSSPATTGDKLREADRLIRRFVKRALHLQIHTANHLIHARIRDGGLGVLELRKTIPEVSLRRCRGIANATSDPVLASFTSSDHFLKLVNKLEKLAGTVPSTEANRSLIITSPSSSGLEAAADDPASRQWLQSLPQGWTGRDFVRAVHLRTGNLPTRDHHSNPPELRKCRDGCEENESLRHILQLCPRVQAHRIRRHNEIASKVANAMRRKWTVEWEPHVKHEDRKLYKPDMAIHLPDQLVIVDVQVAWEWKENSLAVAWDAKRNKYTTPHFMEAAARRWPGRRVTTLPVILGARGIWPSCNRTTVNTLNLSSALRRSCVESCLKWGSTIHKQFMASVFSQSTRSRPQGLSSRDAG

SEQ ID NO: 2497 - protein, 1246 aa, synthetic construct
  source 1..1246: note = MG140-88_M842A
MGDRVKTAQDAGSKTSSCQRDAPPANAQFVCVSCNSRFDRKSSLSLHSKSCGNTRTKCNYCTVSLTTYKLIRQHERRHHNAEYMRDLEAEKPTPDSAYFAKLAAMEAAAKGGVVSIAAMVTATGLTTHQIRTKRSKPVYQKYLEMAKRDQVAKSKLLFGATSSATSPSTSTSVTNATTTASPPSRAVTVSRQHSADGTAPRKNASSSYTRGPCPKASTSASPPGPPPPSVARIETQTDDGKRRRLSSPTVPAGVPTSERKKKRLQGSPLRPTTSRLLPNTTSASATGLPADTPQENASPGPDPPPAAPNKPADRPPAPLGDESALQQPEAPITSCKRLRSPSLSPAMPLAPALRRTSATVTPLRTRLPHAPPPRLNRDSAMASEFRLALEAVLEAEEPCPGIHRLVTSALSDNNSMFQARLDEFWAATWPTTTSRERRRPPRPSGYGSVHHGKGTRAAEYKKAQELFGKDKRGLANTILEGRPILTPPEVPSIQQVEDVFAAIWEADVADGPIAATSPHIPVPSMPPIFEADVQLAREHWMKSAPGPDGITVAQVCRMNPRVLATVFNILLLRAAVPSSWRVLRTVLIHKGGSRTDPNNWRPLTIASTLQRLFHRVLLRHLTSHTTLHPSQRGFRSVDGTFANAVILDAYIKSRTGQGKAWNIVGIDLSKAFDSVSHNAISKALALAGVDERLATYIITSLTGCATQLDLGGKKSRPINIQRGVKQGDPLSPLLFNLVLDPILQHISTCFKGGTIPGGDKVPVIAFADDLFLLADDDLEIPLMLHMLEEYLTQQGLRINARKCVSISAATIAGKSVVRSKSHYRISESLIPCVGNMNSFKYAGHQFSEKGMMPYNLGNLRTWLERVLKAPLKPHQKMCLLKDHVIPKVLHGLSSPATTGDKLREADRLIRRFVKRALHLQIHTANHLIHARIRDGGLGVLELRKTIPEVSLRRCRGIANATSDPVLASFTSSDHFLKLVNKLEKLAGTVPSTEANRSLIITSPSSSGLEAAADDPASRQWLQSLPQGWTGRDFVRAVHLRTGNLPTRDHHSNPPELRKCRDGCEENESLRHILQLCPRVQAHRIRRHNEIASKVANAMRRKWTVEWEPHVKHEDRKLYKPDMAIHLPDQLVIVDVQVAWEWKENSLAVAWDAKRNKYTTPHFMEAAARRWPGRRVTTLPVILGARGIWPSCNRTTVNTLNLSSALRRSCVESCLKWGSTIHKQFMASVFSQSTRSRPQGLSSRDAG

SEQ ID NO: 2498 - protein, 1246 aa, synthetic construct
  source 1..1246: note = MG140-88_F846A
MGDRVKTAQDAGSKTSSCQRDAPPANAQFVCVSCNSRFDRKSSLSLHSKSCGNTRTKCNYCTVSLTTYKLIRQHERRHHNAEYMRDLEAEKPTPDSAYFAKLAAMEAAAKGGVVSIAAMVTATGLTTHQIRTKRSKPVYQKYLEMAKRDQVAKSKLLFGATSSATSPSTSTSVTNATTTASPPSRAVTVSRQHSADGTAPRKNASSSYTRGPCPKASTSASPPGPPPPSVARIETQTDDGKRRRLSSPTVPAGVPTSERKKKRLQGSPLRPTTSRLLPNTTSASATGLPADTPQENASPGPDPPPAAPNKPADRPPAPLGDESALQQPEAPITSCKRLRSPSLSPAMPLAPALRRTSATVTPLRTRLPHAPPPRLNRDSAMASEFRLALEAVLEAEEPCPGIHRLVTSALSDNNSMFQARLDEFWAATWPTTTSRERRRPPRPSGYGSVHHGKGTRAAEYKKAQELFGKDKRGLANTILEGRPILTPPEVPSIQQVEDVFAAIWEADVADGPIAATSPHIPVPSMPPIFEADVQLAREHWMKSAPGPDGITVAQVCRMNPRVLATVFNILLLRAAVPSSWRVLRTVLIHKGGSRTDPNNWRPLTIASTLQRLFHRVLLRHLTSHTTLHPSQRGFRSVDGTFANAVILDAYIKSRTGQGKAWNIVGIDLSKAFDSVSHNAISKALALAGVDERLATYIITSLTGCATQLDLGGKKSRPINIQRGVKQGDPLSPLLFNLVLDPILQHISTCFKGGTIPGGDKVPVIAFADDLFLLADDDLEIPLMLHMLEEYLTQQGLRINARKCVSISAATIAGKSVVRSKSHYRISESLIPCVGNMNSFKYMGHQASEKGMMPYNLGNLRTWLERVLKAPLKPHQKMCLLKDHVIPKVLHGLSSPATTGDKLREADRLIRRFVKRALHLQIHTANHLIHARIRDGGLGVLELRKTIPEVSLRRCRGIANATSDPVLASFTSSDHFLKLVNKLEKLAGTVPSTEANRSLIITSPSSSGLEAAADDPASRQWLQSLPQGWTGRDFVRAVHLRTGNLPTRDHHSNPPELRKCRDGCEENESLRHILQLCPRVQAHRIRRHNEIASKVANAMRRKWTVEWEPHVKHEDRKLYKPDMAIHLPDQLVIVDVQVAWEWKENSLAVAWDAKRNKYTTPHFMEAAARRWPGRRVTTLPVILGARGIWPSCNRTTVNTLNLSSALRRSCVESCLKWGSTIHKQFMASVFSQSTRSRPQGLSSRDAG

SEQ ID NO: 2499 - protein, 1246 aa, synthetic construct
  source 1..1246: note = MG140-88_L892A
MGDRVKTAQDAGSKTSSCQRDAPPANAQFVCVSCNSRFDRKSSLSLHSKSCGNTRTKCNYCTVSLTTYKLIRQHERRHHNAEYMRDLEAEKPTPDSAYFAKLAAMEAAAKGGVVSIAAMVTATGLTTHQIRTKRSKPVYQKYLEMAKRDQVAKSKLLFGATSSATSPSTSTSVTNATTTASPPSRAVTVSRQHSADGTAPRKNASSSYTRGPCPKASTSASPPGPPPPSVARIETQTDDGKRRRLSSPTVPAGVPTSERKKKRLQGSPLRPTTSRLLPNTTSASATGLPADTPQENASPGPDPPPAAPNKPADRPPAPLGDESALQQPEAPITSCKRLRSPSLSPAMPLAPALRRTSATVTPLRTRLPHAPPPRLNRDSAMASEFRLALEAVLEAEEPCPGIHRLVTSALSDNNSMFQARLDEFWAATWPTTTSRERRRPPRPSGYGSVHHGKGTRAAEYKKAQELFGKDKRGLANTILEGRPILTPPEVPSIQQVEDVFAAIWEADVADGPIAATSPHIPVPSMPPIFEADVQLAREHWMKSAPGPDGITVAQVCRMNPRVLATVFNILLLRAAVPSSWRVLRTVLIHKGGSRTDPNNWRPLTIASTLQRLFHRVLLRHLTSHTTLHPSQRGFRSVDGTFANAVILDAYIKSRTGQGKAWNIVGIDLSKAFDSVSHNAISKALALAGVDERLATYIITSLTGCATQLDLGGKKSRPINIQRGVKQGDPLSPLLFNLVLDPILQHISTCFKGGTIPGGDKVPVIAFADDLFLLADDDLEIPLMLHMLEEYLTQQGLRINARKCVSISAATIAGKSVVRSKSHYRISESLIPCVGNMNSFKYMGHQFSEKGMMPYNLGNLRTWLERVLKAPLKPHQKMCLLKDHVIPKVLHGASSPATTGDKLREADRLIRRFVKRALHLQIHTANHLIHARIRDGGLGVLELRKTIPEVSLRRCRGIANATSDPVLASFTSSDHFLKLVNKLEKLAGTVPSTEANRSLIITSPSSSGLEAAADDPASRQWLQSLPQGWTGRDFVRAVHLRTGNLPTRDHHSNPPELRKCRDGCEENESLRHILQLCPRVQAHRIRRHNEIASKVANAMRRKWTVEWEPHVKHEDRKLYKPDMAIHLPDQLVIVDVQVAWEWKENSLAVAWDAKRNKYTTPHFMEAAARRWPGRRVTTLPVILGARGIWPSCNRTTVNTLNLSSALRRSCVESCLKWGSTIHKQFMASVFSQSTRSRPQGLSSRDAG

SEQ ID NO: 2500 - protein, 1246 aa, synthetic construct
  source 1..1246: note = MG140-88_I909A
MGDRVKTAQDAGSKTSSCQRDAPPANAQFVCVSCNSRFDRKSSLSLHSKSCGNTRTKCNYCTVSLTTYKLIRQHERRHHNAEYMRDLEAEKPTPDSAYFAKLAAMEAAAKGGVVSIAAMVTATGLTTHQIRTKRSKPVYQKYLEMAKRDQVAKSKLLFGATSSATSPSTSTSVTNATTTASPPSRAVTVSRQHSADGTAPRKNASSSYTRGPCPKASTSASPPGPPPPSVARIETQTDDGKRRRLSSPTVPAGVPTSERKKKRLQGSPLRPTTSRLLPNTTSASATGLPADTPQENASPGPDPPPAAPNKPADRPPAPLGDESALQQPEAPITSCKRLRSPSLSPAMPLAPALRRTSATVTPLRTRLPHAPPPRLNRDSAMASEFRLALEAVLEAEEPCPGIHRLVTSALSDNNSMFQARLDEFWAATWPTTTSRERRRPPRPSGYGSVHHGKGTRAAEYKKAQELFGKDKRGLANTILEGRPILTPPEVPSIQQVEDVFAAIWEADVADGPIAATSPHIPVPSMPPIFEADVQLAREHWMKSAPGPDGITVAQVCRMNPRVLATVFNILLLRAAVPSSWRVLRTVLIHKGGSRTDPNNWRPLTIASTLQRLFHRVLLRHLTSHTTLHPSQRGFRSVDGTFANAVILDAYIKSRTGQGKAWNIVGIDLSKAFDSVSHNAISKALALAGVDERLATYIITSLTGCATQLDLGGKKSRPINIQRGVKQGDPLSPLLFNLVLDPILQHISTCFKGGTIPGGDKVPVIAFADDLFLLADDDLEIPLMLHMLEEYLTQQGLRINARKCVSISAATIAGKSVVRSKSHYRISESLIPCVGNMNSFKYMGHQFSEKGMMPYNLGNLRTWLERVLKAPLKPHQKMCLLKDHVIPKVLHGLSSPATTGDKLREADRLARRFVKRALHLQIHTANHLIHARIRDGGLGVLELRKTIPEVSLRRCRGIANATSDPVLASFTSSDHFLKLVNKLEKLAGTVPSTEANRSLIITSPSSSGLEAAADDPASRQWLQSLPQGWTGRDFVRAVHLRTGNLPTRDHHSNPPELRKCRDGCEENESLRHILQLCPRVQAHRIRRHNEIASKVANAMRRKWTVEWEPHVKHEDRKLYKPDMAIHLPDQLVIVDVQVAWEWKENSLAVAWDAKRNKYTTPHFMEAAARRWPGRRVTTLPVILGARGIWPSCNRTTVNTLNLSSALRRSCVESCLKWGSTIHKQFMASVFSQSTRSRPQGLSSRDAG

SEQ ID NO: 2501 - protein, 1246 aa, synthetic construct
  source 1..1246: note = MG140-88_K590A
MGDRVKTAQDAGSKTSSCQRDAPPANAQFVCVSCNSRFDRKSSLSLHSKSCGNTRTKCNYCTVSLTTYKLIRQHERRHHNAEYMRDLEAEKPTPDSAYFAKLAAMEAAAKGGVVSIAAMVTATGLTTHQIRTKRSKPVYQKYLEMAKRDQVAKSKLLFGATSSATSPSTSTSVTNATTTASPPSRAVTVSRQHSADGTAPRKNASSSYTRGPCPKASTSASPPGPPPPSVARIETQTDDGKRRRLSSPTVPAGVPTSERKKKRLQGSPLRPTTSRLLPNTTSASATGLPADTPQENASPGPDPPPAAPNKPADRPPAPLGDESALQQPEAPITSCKRLRSPSLSPAMPLAPALRRTSATVTPLRTRLPHAPPPRLNRDSAMASEFRLALEAVLEAEEPCPGIHRLVTSALSDNNSMFQARLDEFWAATWPTTTSRERRRPPRPSGYGSVHHGKGTRAAEYKKAQELFGKDKRGLANTILEGRPILTPPEVPSIQQVEDVFAAIWEADVADGPIAATSPHIPVPSMPPIFEADVQLAREHWMKSAPGPDGITVAQVCRMNPRVLATVFNILLLRAAVPSSWRVLRTVLIHAGGSRTDPNNWRPLTIASTLQRLFHRVLLRHLTSHTTLHPSQRGFRSVDGTFANAVILDAYIKSRTGQGKAWNIVGIDLSKAFDSVSHNAISKALALAGVDERLATYIITSLTGCATQLDLGGKKSRPINIQRGVKQGDPLSPLLFNLVLDPILQHISTCFKGGTIPGGDKVPVIAFADDLFLLADDDLEIPLMLHMLEEYLTQQGLRINARKCVSISAATIAGKSVVRSKSHYRISESLIPCVGNMNSFKYMGHQFSEKGMMPYNLGNLRTWLERVLKAPLKPHQKMCLLKDHVIPKVLHGLSSPATTGDKLREADRLIRRFVKRALHLQIHTANHLIHARIRDGGLGVLELRKTIPEVSLRRCRGIANATSDPVLASFTSSDHFLKLVNKLEKLAGTVPSTEANRSLIITSPSSSGLEAAADDPASRQWLQSLPQGWTGRDFVRAVHLRTGNLPTRDHHSNPPELRKCRDGCEENESLRHILQLCPRVQAHRIRRHNEIASKVANAMRRKWTVEWEPHVKHEDRKLYKPDMAIHLPDQLVIVDVQVAWEWKENSLAVAWDAKRNKYTTPHFMEAAARRWPGRRVTTLPVILGARGIWPSCNRTTVNTLNLSSALRRSCVESCLKWGSTIHKQFMASVFSQSTRSRPQGLSSRDAG

SEQ ID NO: 2502 - protein, 1246 aa, synthetic construct
  source 1..1246: note = MG140-88_R601A
MGDRVKTAQDAGSKTSSCQRDAPPANAQFVCVSCNSRFDRKSSLSLHSKSCGNTRTKCNYCTVSLTTYKLIRQHERRHHNAEYMRDLEAEKPTPDSAYFAKLAAMEAAAKGGVVSIAAMVTATGLTTHQIRTKRSKPVYQKYLEMAKRDQVAKSKLLFGATSSATSPSTSTSVTNATTTASPPSRAVTVSRQHSADGTAPRKNASSSYTRGPCPKASTSASPPGPPPPSVARIETQTDDGKRRRLSSPTVPAGVPTSERKKKRLQGSPLRPTTSRLLPNTTSASATGLPADTPQENASPGPDPPPAAPNKPADRPPAPLGDESALQQPEAPITSCKRLRSPSLSPAMPLAPALRRTSATVTPLRTRLPHAPPPRLNRDSAMASEFRLALEAVLEAEEPCPGIHRLVTSALSDNNSMFQARLDEFWAATWPTTTSRERRRPPRPSGYGSVHHGKGTRAAEYKKAQELFGKDKRGLANTILEGRPILTPPEVPSIQQVEDVFAAIWEADVADGPIAATSPHIPVPSMPPIFEADVQLAREHWMKSAPGPDGITVAQVCRMNPRVLATVFNILLLRAAVPSSWRVLRTVLIHKGGSRTDPNNWAPLTIASTLQRLFHRVLLRHLTSHTTLHPSQRGFRSVDGTFANAVILDAYIKSRTGQGKAWNIVGIDLSKAFDSVSHNAISKALALAGVDERLATYIITSLTGCATQLDLGGKKSRPINIQRGVKQGDPLSPLLFNLVLDPILQHISTCFKGGTIPGGDKVPVIAFADDLFLLADDDLEIPLMLHMLEEYLTQQGLRINARKCVSISAATIAGKSVVRSKSHYRISESLIPCVGNMNSFKYMGHQFSEKGMMPYNLGNLRTWLERVLKAPLKPHQKMCLLKDHVIPKVLHGLSSPATTGDKLREADRLIRRFVKRALHLQIHTANHLIHARIRDGGLGVLELRKTIPEVSLRRCRGIANATSDPVLASFTSSDHFLKLVNKLEKLAGTVPSTEANRSLIITSPSSSGLEAAADDPASRQWLQSLPQGWTGRDFVRAVHLRTGNLPTRDHHSNPPELRKCRDGCEENESLRHILQLCPRVQAHRIRRHNEIASKVANAMRRKWTVEWEPHVKHEDRKLYKPDMAIHLPDQLVIVDVQVAWEWKENSLAVAWDAKRNKYTTPHFMEAAARRWPGRRVTTLPVILGARGIWPSCNRTTVNTLNLSSALRRSCVESCLKWGSTIHKQFMASVFSQSTRSRPQGLSSRDAG

SEQ ID NO: 2503 - protein, 1246 aa, synthetic construct
  source 1..1246: note = MG140-88_L603A
MGDRVKTAQDAGSKTSSCQRDAPPANAQFVCVSCNSRFDRKSSLSLHSKSCGNTRTKCNYCTVSLTTYKLIRQHERRHHNAEYMRDLEAEKPTPDSAYFAKLAAMEAAAKGGVVSIAAMVTATGLTTHQIRTKRSKPVYQKYLEMAKRDQVAKSKLLFGATSSATSPSTSTSVTNATTTASPPSRAVTVSRQHSADGTAPRKNASSSYTRGPCPKASTSASPPGPPPPSVARIETQTDDGKRRRLSSPTVPAGVPTSERKKKRLQGSPLRPTTSRLLPNTTSASATGLPADTPQENASPGPDPPPAAPNKPADRPPAPLGDESALQQPEAPITSCKRLRSPSLSPAMPLAPALRRTSATVTPLRTRLPHAPPPRLNRDSAMASEFRLALEAVLEAEEPCPGIHRLVTSALSDNNSMFQARLDEFWAATWPTTTSRERRRPPRPSGYGSVHHGKGTRAAEYKKAQELFGKDKRGLANTILEGRPILTPPEVPSIQQVEDVFAAIWEADVADGPIAATSPHIPVPSMPPIFEADVQLAREHWMKSAPGPDGITVAQVCRMNPRVLATVFNILLLRAAVPSSWRVLRTVLIHKGGSRTDPNNWRPATIASTLQRLFHRVLLRHLTSHTTLHPSQRGFRSVDGTFANAVILDAYIKSRTGQGKAWNIVGIDLSKAFDSVSHNAISKALALAGVDERLATYIITSLTGCATQLDLGGKKSRPINIQRGVKQGDPLSPLLFNLVLDPILQHISTCFKGGTIPGGDKVPVIAFADDLFLLADDDLEIPLMLHMLEEYLTQQGLRINARKCVSISAATIAGKSVVRSKSHYRISESLIPCVGNMNSFKYMGHQFSEKGMMPYNLGNLRTWLERVLKAPLKPHQKMCLLKDHVIPKVLHGLSSPATTGDKLREADRLIRRFVKRALHLQIHTANHLIHARIRDGGLGVLELRKTIPEVSLRRCRGIANATSDPVLASFTSSDHFLKLVNKLEKLAGTVPSTEANRSLIITSPSSSGLEAAADDPASRQWLQSLPQGWTGRDFVRAVHLRTGNLPTRDHHSNPPELRKCRDGCEENESLRHILQLCPRVQAHRIRRHNEIASKVANAMRRKWTVEWEPHVKHEDRKLYKPDMAIHLPDQLVIVDVQVAWEWKENSLAVAWDAKRNKYTTPHFMEAAARRWPGRRVTTLPVILGARGIWPSCNRTTVNTLNLSSALRRSCVESCLKWGSTIHKQFMASVFSQSTRSRPQGLSSRDAG

SEQ ID NO: 2504 - protein, 1246 aa, synthetic construct
  source 1..1246: note = MG140-88_R611A
MGDRVKTAQDAGSKTSSCQRDAPPANAQFVCVSCNSRFDRKSSLSLHSKSCGNTRTKCNYCTVSLTTYKLIRQHERRHHNAEYMRDLEAEKPTPDSAYFAKLAAMEAAAKGGVVSIAAMVTATGLTTHQIRTKRSKPVYQKYLEMAKRDQVAKSKLLFGATSSATSPSTSTSVTNATTTASPPSRAVTVSRQHSADGTAPRKNASSSYTRGPCPKASTSASPPGPPPPSVARIETQTDDGKRRRLSSPTVPAGVPTSERKKKRLQGSPLRPTTSRLLPNTTSASATGLPADTPQENASPGPDPPPAAPNKPADRPPAPLGDESALQQPEAPITSCKRLRSPSLSPAMPLAPALRRTSATVTPLRTRLPHAPPPRLNRDSAMASEFRLALEAVLEAEEPCPGIHRLVTSALSDNNSMFQARLDEFWAATWPTTTSRERRRPPRPSGYGSVHHGKGTRAAEYKKAQELFGKDKRGLANTILEGRPILTPPEVPSIQQVEDVFAAIWEADVADGPIAATSPHIPVPSMPPIFEADVQLAREHWMKSAPGPDGITVAQVCRMNPRVLATVFNILLLRAAVPSSWRVLRTVLIHKGGSRTDPNNWRPLTIASTLQALFHRVLLRHLTSHTTLHPSQRGFRSVDGTFANAVILDAYIKSRTGQGKAWNIVGIDLSKAFDSVSHNAISKALALAGVDERLATYIITSLTGCATQLDLGGKKSRPINIQRGVKQGDPLSPLLFNLVLDPILQHISTCFKGGTIPGGDKVPVIAFADDLFLLADDDLEIPLMLHMLEEYLTQQGLRINARKCVSISAATIAGKSVVRSKSHYRISESLIPCVGNMNSFKYMGHQFSEKGMMPYNLGNLRTWLERVLKAPLKPHQKMCLLKDHVIPKVLHGLSSPATTGDKLREADRLIRRFVKRALHLQIHTANHLIHARIRDGGLGVLELRKTIPEVSLRRCRGIANATSDPVLASFTSSDHFLKLVNKLEKLAGTVPSTEANRSLIITSPSSSGLEAAADDPASRQWLQSLPQGWTGRDFVRAVHLRTGNLPTRDHHSNPPELRKCRDGCEENESLRHILQLCPRVQAHRIRRHNEIASKVANAMRRKWTVEWEPHVKHEDRKLYKPDMAIHLPDQLVIVDVQVAWEWKENSLAVAWDAKRNKYTTPHFMEAAARRWPGRRVTTLPVILGARGIWPSCNRTTVNTLNLSSALRRSCVESCLKWGSTIHKQFMASVFSQSTRSRPQGLSSRDAG

SEQ ID NO: 2505 - protein, 1246 aa, synthetic construct
  source 1..1246: note = MG140-88_F672G
MGDRVKTAQDAGSKTSSCQRDAPPANAQFVCVSCNSRFDRKSSLSLHSKSCGNTRTKCNYCTVSLTTYKLIRQHERRHHNAEYMRDLEAEKPTPDSAYFAKLAAMEAAAKGGVVSIAAMVTATGLTTHQIRTKRSKPVYQKYLEMAKRDQVAKSKLLFGATSSATSPSTSTSVTNATTTASPPSRAVTVSRQHSADGTAPRKNASSSYTRGPCPKASTSASPPGPPPPSVARIETQTDDGKRRRLSSPTVPAGVPTSERKKKRLQGSPLRPTTSRLLPNTTSASATGLPADTPQENASPGPDPPPAAPNKPADRPPAPLGDESALQQPEAPITSCKRLRSPSLSPAMPLAPALRRTSATVTPLRTRLPHAPPPRLNRDSAMASEFRLALEAVLEAEEPCPGIHRLVTSALSDNNSMFQARLDEFWAATWPTTTSRERRRPPRPSGYGSVHHGKGTRAAEYKKAQELFGKDKRGLANTILEGRPILTPPEVPSIQQVEDVFAAIWEADVADGPIAATSPHIPVPSMPPIFEADVQLAREHWMKSAPGPDGITVAQVCRMNPRVLATVFNILLLRAAVPSSWRVLRTVLIHKGGSRTDPNNWRPLTIASTLQRLFHRVLLRHLTSHTTLHPSQRGFRSVDGTFANAVILDAYIKSRTGQGKAWNIVGIDLSKAGDSVSHNAISKALALAGVDERLATYIITSLTGCATQLDLGGKKSRPINIQRGVKQGDPLSPLLFNLVLDPILQHISTCFKGGTIPGGDKVPVIAFADDLFLLADDDLEIPLMLHMLEEYLTQQGLRINARKCVSISAATIAGKSVVRSKSHYRISESLIPCVGNMNSFKYMGHQFSEKGMMPYNLGNLRTWLERVLKAPLKPHQKMCLLKDHVIPKVLHGLSSPATTGDKLREADRLIRRFVKRALHLQIHTANHLIHARIRDGGLGVLELRKTIPEVSLRRCRGIANATSDPVLASFTSSDHFLKLVNKLEKLAGTVPSTEANRSLIITSPSSSGLEAAADDPASRQWLQSLPQGWTGRDFVRAVHLRTGNLPTRDHHSNPPELRKCRDGCEENESLRHILQLCPRVQAHRIRRHNEIASKVANAMRRKWTVEWEPHVKHEDRKLYKPDMAIHLPDQLVIVDVQVAWEWKENSLAVAWDAKRNKYTTPHFMEAAARRWPGRRVTTLPVILGARGIWPSCNRTTVNTLNLSSALRRSCVESCLKWGSTIHKQFMASVFSQSTRSRPQGLSSRDAG

SEQ ID NO: 2506 - protein, 1035 aa, synthetic construct
  source 1..1035: note = MG140-74_G326A
MFACGQCERTFGNKGALGNHCKWKHAQTRLPERTNGGEFPCPDCDNAYGSSGGLNVHRRARHPDVYHAARQPAARVKARWSYEELVLVARAELEIRGTNPPQGVVRVLHSRFPDRTFEAIKCLRNKNPRYKEVLAALEVEEVDEGLPTVTPSEQTHAFAQADGLWRDQLRMAINIEHLGVDDLDWVADGCPAEDIRKKLDELFASWVGHLVRGERAPARSHQPAAGVTNPSRELDPRRRRRAQYSAIQHLYGRKPSAAAHKVLDGSWECGDPVPTPTLEDFRMAWQPIFETPSIKDNRRPTCVGQVRWEIVSPVTPGELEKVLTEAASSAPGPDGVKLKDVIGLGIGELCSHFNLWLLCGSQPSAMCVGRTIYIPKGSESNDALKYRPITIASHILRVFHKIMARRFDAFLPLKYTQKGFRSGDGIAQHVLSLQAIIDGAKRQRKPVNLVFLDVRKAFDSVSHDTIVLAMRRLGCPDPFLSYIRDLYSRSSTVIEHNGERSAPIFTRRGVKQGDPLSPFMFNAVIDWAFSSLDDHVGFSFGHVRVNNLGYADDVALLSDTRAGLRSQLGKFESHLAKGGLTISAGTEGKSSSLSIVVDGKAKRWVVDQTPFLATNEGIIPSLSASGEYRYLGIMLGSGGAKVRSSLREELLQGLQNITRAPLKPYQRMRILRNFLLPKYLHELVLAPVADGWLNWLDTAIRANVRQWLKLPQDTPVAFIHAGTGDGGLSVPSLRYSVPVMRRKRLEAVHSATDPLSTALTASPFFQKELSGLSRKTLGGRLVTDKQSLAQAWAGCLYTKVDGRGLSEARSCAEGSRWVSNPPRNQSGANYIGAIKARGGLLYSKVRSARGDSGRDVRCDSCMRPETAQHIIQVCPRTSGPRMRRHDRVVQFVSAAAERAGYKVLVEPRIVGRTLGVRKPDLVLWNESRAYVADVTITSDQVGGVKAHRDKVAYYDQPEIREWVERFTGLSHISFSAVAANWRGVLSPLSADFLKSVLKLSNWDISLLGLRICEETYHIHRYFGRSTYRVRGRGPS

SEQ ID NO: 2507 - protein, 1035 aa, synthetic construct
  source 1..1035: note = MG140-74_K339A
MFACGQCERTFGNKGALGNHCKWKHAQTRLPERTNGGEFPCPDCDNAYGSSGGLNVHRRARHPDVYHAARQPAARVKARWSYEELVLVARAELEIRGTNPPQGVVRVLHSRFPDRTFEAIKCLRNKNPRYKEVLAALEVEEVDEGLPTVTPSEQTHAFAQADGLWRDQLRMAINIEHLGVDDLDWVADGCPAEDIRKKLDELFASWVGHLVRGERAPARSHQPAAGVTNPSRELDPRRRRRAQYSAIQHLYGRKPSAAAHKVLDGSWECGDPVPTPTLEDFRMAWQPIFETPSIKDNRRPTCVGQVRWEIVSPVTPGELEKVLTEGASSAPGPDGVKLADVIGLGIGELCSHFNLWLLCGSQPSAMCVGRTIYIPKGSESNDALKYRPITIASHILRVFHKIMARRFDAFLPLKYTQKGFRSGDGIAQHVLSLQAIIDGAKRQRKPVNLVFLDVRKAFDSVSHDTIVLAMRRLGCPDPFLSYIRDLYSRSSTVIEHNGERSAPIFTRRGVKQGDPLSPFMFNAVIDWAFSSLDDHVGFSFGHVRVNNLGYADDVALLSDTRAGLRSQLGKFESHLAKGGLTISAGTEGKSSSLSIVVDGKAKRWVVDQTPFLATNEGIIPSLSASGEYRYLGIMLGSGGAKVRSSLREELLQGLQNITRAPLKPYQRMRILRNFLLPKYLHELVLAPVADGWLNWLDTAIRANVRQWLKLPQDTPVAFIHAGTGDGGLSVPSLRYSVPVMRRKRLEAVHSATDPLSTALTASPFFQKELSGLSRKTLGGRLVTDKQSLAQAWAGCLYTKVDGRGLSEARSCAEGSRWVSNPPRNQSGANYIGAIKARGGLLYSKVRSARGDSGRDVRCDSCMRPETAQHIIQVCPRTSGPRMRRHDRVVQFVSAAAERAGYKVLVEPRIVGRTLGVRKPDLVLWNESRAYVADVTITSDQVGGVKAHRDKVAYYDQPEIREWVERFTGLSHISFSAVAANWRGVLSPLSADFLKSVLKLSNWDISLLGLRICEETYHIHRYFGRSTYRVRGRGPS

SEQ ID NO: 2508 - protein, 1035 aa, synthetic construct
  source 1..1035: note = MG140-74_D424A
MFACGQCERTFGNKGALGNHCKWKHAQTRLPERTNGGEFPCPDCDNAYGSSGGLNVHRRARHPDVYHAARQPAARVKARWSYEELVLVARAELEIRGTNPPQGVVRVLHSRFPDRTFEAIKCLRNKNPRYKEVLAALEVEEVDEGLPTVTPSEQTHAFAQADGLWRDQLRMAINIEHLGVDDLDWVADGCPAEDIRKKLDELFASWVGHLVRGERAPARSHQPAAGVTNPSRELDPRRRRRAQYSAIQHLYGRKPSAAAHKVLDGSWECGDPVPTPTLEDFRMAWQPIFETPSIKDNRRPTCVGQVRWEIVSPVTPGELEKVLTEGASSAPGPDGVKLKDVIGLGIGELCSHFNLWLLCGSQPSAMCVGRTIYIPKGSESNDALKYRPITIASHILRVFHKIMARRFDAFLPLKYTQKGFRSGAGIAQHVLSLQAIIDGAKRQRKPVNLVFLDVRKAFDSVSHDTIVLAMRRLGCPDPFLSYIRDLYSRSSTVIEHNGERSAPIFTRRGVKQGDPLSPFMFNAVIDWAFSSLDDHVGFSFGHVRVNNLGYADDVALLSDTRAGLRSQLGKFESHLAKGGLTISAGTEGKSSSLSIVVDGKAKRWVVDQTPFLATNEGIIPSLSASGEYRYLGIMLGSGGAKVRSSLREELLQGLQNITRAPLKPYQRMRILRNFLLPKYLHELVLAPVADGWLNWLDTAIRANVRQWLKLPQDTPVAFIHAGTGDGGLSVPSLRYSVPVMRRKRLEAVHSATDPLSTALTASPFFQKELSGLSRKTLGGRLVTDKQSLAQAWAGCLYTKVDGRGLSEARSCAEGSRWVSNPPRNQSGANYIGAIKARGGLLYSKVRSARGDSGRDVRCDSCMRPETAQHIIQVCPRTSGPRMRRHDRVVQFVSAAAERAGYKVLVEPRIVGRTLGVRKPDLVLWNESRAYVADVTITSDQVGGVKAHRDKVAYYDQPEIREWVERFTGLSHISFSAVAANWRGVLSPLSADFLKSVLKLSNWDISLLGLRICEETYHIHRYFGRSTYRVRGRGPS

SEQ ID NO: 2509 - protein, 1035 aa, synthetic construct
  source 1..1035: note = MG140-74_L631A
MFACGQCERTFGNKGALGNHCKWKHAQTRLPERTNGGEFPCPDCDNAYGSSGGLNVHRRARHPDVYHAARQPAARVKARWSYEELVLVARAELEIRGTNPPQGVVRVLHSRFPDRTFEAIKCLRNKNPRYKEVLAALEVEEVDEGLPTVTPSEQTHAFAQADGLWRDQLRMAINIEHLGVDDLDWVADGCPAEDIRKKLDELFASWVGHLVRGERAPARSHQPAAGVTNPSRELDPRRRRRAQYSAIQHLYGRKPSAAAHKVLDGSWECGDPVPTPTLEDFRMAWQPIFETPSIKDNRRPTCVGQVRWEIVSPVTPGELEKVLTEGASSAPGPDGVKLKDVIGLGIGELCSHFNLWLLCGSQPSAMCVGRTIYIPKGSESNDALKYRPITIASHILRVFHKIMARRFDAFLPLKYTQKGFRSGDGIAQHVLSLQAIIDGAKRQRKPVNLVFLDVRKAFDSVSHDTIVLAMRRLGCPDPFLSYIRDLYSRSSTVIEHNGERSAPIFTRRGVKQGDPLSPFMFNAVIDWAFSSLDDHVGFSFGHVRVNNLGYADDVALLSDTRAGLRSQLGKFESHLAKGGLTISAGTEGKSSSLSIVVDGKAKRWVVDQTPFLATNEGIIPSLSASGEYRYAGIMLGSGGAKVRSSLREELLQGLQNITRAPLKPYQRMRILRNFLLPKYLHELVLAPVADGWLNWLDTAIRANVRQWLKLPQDTPVAFIHAGTGDGGLSVPSLRYSVPVMRRKRLEAVHSATDPLSTALTASPFFQKELSGLSRKTLGGRLVTDKQSLAQAWAGCLYTKVDGRGLSEARSCAEGSRWVSNPPRNQSGANYIGAIKARGGLLYSKVRSARGDSGRDVRCDSCMRPETAQHIIQVCPRTSGPRMRRHDRVVQFVSAAAERAGYKVLVEPRIVGRTLGVRKPDLVLWNESRAYVADVTITSDQVGGVKAHRDKVAYYDQPEIREWVERFTGLSHISFSAVAANWRGVLSPLSADFLKSVLKLSNWDISLLGLRICEETYHIHRYFGRSTYRVRGRGPS

SEQ ID NO: 2510 - protein, 1035 aa, synthetic construct
  source 1..1035: note = MG140-74_L635A
MFACGQCERTFGNKGALGNHCKWKHAQTRLPERTNGGEFPCPDCDNAYGSSGGLNVHRRARHPDVYHAARQPAARVKARWSYEELVLVARAELEIRGTNPPQGVVRVLHSRFPDRTFEAIKCLRNKNPRYKEVLAALEVEEVDEGLPTVTPSEQTHAFAQADGLWRDQLRMAINIEHLGVDDLDWVADGCPAEDIRKKLDELFASWVGHLVRGERAPARSHQPAAGVTNPSRELDPRRRRRAQYSAIQHLYGRKPSAAAHKVLDGSWECGDPVPTPTLEDFRMAWQPIFETPSIKDNRRPTCVGQVRWEIVSPVTPGELEKVLTEGASSAPGPDGVKLKDVIGLGIGELCSHFNLWLLCGSQPSAMCVGRTIYIPKGSESNDALKYRPITIASHILRVFHKIMARRFDAFLPLKYTQKGFRSGDGIAQHVLSLQAIIDGAKRQRKPVNLVFLDVRKAFDSVSHDTIVLAMRRLGCPDPFLSYIRDLYSRSSTVIEHNGERSAPIFTRRGVKQGDPLSPFMFNAVIDWAFSSLDDHVGFSFGHVRVNNLGYADDVALLSDTRAGLRSQLGKFESHLAKGGLTISAGTEGKSSSLSIVVDGKAKRWVVDQTPFLATNEGIIPSLSASGEYRYLGIMAGSGGAKVRSSLREELLQGLQNITRAPLKPYQRMRILRNFLLPKYLHELVLAPVADGWLNWLDTAIRANVRQWLKLPQDTPVAFIHAGTGDGGLSVPSLRYSVPVMRRKRLEAVHSATDPLSTALTASPFFQKELSGLSRKTLGGRLVTDKQSLAQAWAGCLYTKVDGRGLSEARSCAEGSRWVSNPPRNQSGANYIGAIKARGGLLYSKVRSARGDSGRDVRCDSCMRPETAQHIIQVCPRTSGPRMRRHDRVVQFVSAAAERAGYKVLVEPRIVGRTLGVRKPDLVLWNESRAYVADVTITSDQVGGVKAHRDKVAYYDQPEIREWVERFTGLSHISFSAVAANWRGVLSPLSADFLKSVLKLSNWDISLLGLRICEETYHIHRYFGRSTYRVRGRGPS

SEQ ID NO: 2511 - protein, 1035 aa, synthetic construct
  source 1..1035: note = MG140-74_L683A
MFACGQCERTFGNKGALGNHCKWKHAQTRLPERTNGGEFPCPDCDNAYGSSGGLNVHRRARHPDVYHAARQPAARVKARWSYEELVLVARAELEIRGTNPPQGVVRVLHSRFPDRTFEAIKCLRNKNPRYKEVLAALEVEEVDEGLPTVTPSEQTHAFAQADGLWRDQLRMAINIEHLGVDDLDWVADGCPAEDIRKKLDELFASWVGHLVRGERAPARSHQPAAGVTNPSRELDPRRRRRAQYSAIQHLYGRKPSAAAHKVLDGSWECGDPVPTPTLEDFRMAWQPIFETPSIKDNRRPTCVGQVRWEIVSPVTPGELEKVLTEGASSAPGPDGVKLKDVIGLGIGELCSHFNLWLLCGSQPSAMCVGRTIYIPKGSESNDALKYRPITIASHILRVFHKIMARRFDAFLPLKYTQKGFRSGDGIAQHVLSLQAIIDGAKRQRKPVNLVFLDVRKAFDSVSHDTIVLAMRRLGCPDPFLSYIRDLYSRSSTVIEHNGERSAPIFTRRGVKQGDPLSPFMFNAVIDWAFSSLDDHVGFSFGHVRVNNLGYADDVALLSDTRAGLRSQLGKFESHLAKGGLTISAGTEGKSSSLSIVVDGKAKRWVVDQTPFLATNEGIIPSLSASGEYRYLGIMLGSGGAKVRSSLREELLQGLQNITRAPLKPYQRMRILRNFLLPKYLHEAVLAPVADGWLNWLDTAIRANVRQWLKLPQDTPVAFIHAGTGDGGLSVPSLRYSVPVMRRKRLEAVHSATDPLSTALTASPFFQKELSGLSRKTLGGRLVTDKQSLAQAWAGCLYTKVDGRGLSEARSCAEGSRWVSNPPRNQSGANYIGAIKARGGLLYSKVRSARGDSGRDVRCDSCMRPETAQHIIQVCPRTSGPRMRRHDRVVQFVSAAAERAGYKVLVEPRIVGRTLGVRKPDLVLWNESRAYVADVTITSDQVGGVKAHRDKVAYYDQPEIREWVERFTGLSHISFSAVAANWRGVLSPLSADFLKSVLKLSNWDISLLGLRICEETYHIHRYFGRSTYRVRGRGPS

SEQ ID NO: 2512 - protein, 1035 aa, synthetic construct
  source 1..1035: note = MG140-74_I700A
MFACGQCERTFGNKGALGNHCKWKHAQTRLPERTNGGEFPCPDCDNAYGSSGGLNVHRRARHPDVYHAARQPAARVKARWSYEELVLVARAELEIRGTNPPQGVVRVLHSRFPDRTFEAIKCLRNKNPRYKEVLAALEVEEVDEGLPTVTPSEQTHAFAQADGLWRDQLRMAINIEHLGVDDLDWVADGCPAEDIRKKLDELFASWVGHLVRGERAPARSHQPAAGVTNPSRELDPRRRRRAQYSAIQHLYGRKPSAAAHKVLDGSWECGDPVPTPTLEDFRMAWQPIFETPSIKDNRRPTCVGQVRWEIVSPVTPGELEKVLTEGASSAPGPDGVKLKDVIGLGIGELCSHFNLWLLCGSQPSAMCVGRTIYIPKGSESNDALKYRPITIASHILRVFHKIMARRFDAFLPLKYTQKGFRSGDGIAQHVLSLQAIIDGAKRQRKPVNLVFLDVRKAFDSVSHDTIVLAMRRLGCPDPFLSYIRDLYSRSSTVIEHNGERSAPIFTRRGVKQGDPLSPFMFNAVIDWAFSSLDDHVGFSFGHVRVNNLGYADDVALLSDTRAGLRSQLGKFESHLAKGGLTISAGTEGKSSSLSIVVDGKAKRWVVDQTPFLATNEGIIPSLSASGEYRYLGIMLGSGGAKVRSSLREELLQGLQNITRAPLKPYQRMRILRNFLLPKYLHELVLAPVADGWLNWLDTAARANVRQWLKLPQDTPVAFIHAGTGDGGLSVPSLRYSVPVMRRKRLEAVHSATDPLSTALTASPFFQKELSGLSRKTLGGRLVTDKQSLAQAWAGCLYTKVDGRGLSEARSCAEGSRWVSNPPRNQSGANYIGAIKARGGLLYSKVRSARGDSGRDVRCDSCMRPETAQHIIQVCPRTSGPRMRRHDRVVQFVSAAAERAGYKVLVEPRIVGRTLGVRKPDLVLWNESRAYVADVTITSDQVGGVKAHRDKVAYYDQPEIREWVERFTGLSHISFSAVAANWRGVLSPLSADFLKSVLKLSNWDISLLGLRICEETYHIHRYFGRSTYRVRGRGPS

SEQ ID NO: 2513 - protein, 1035 aa, synthetic construct
  source 1..1035: note = MG140-74_K376A
MFACGQCERTFGNKGALGNHCKWKHAQTRLPERTNGGEFPCPDCDNAYGSSGGLNVHRRARHPDVYHAARQPAARVKARWSYEELVLVARAELEIRGTNPPQGVVRVLHSRFPDRTFEAIKCLRNKNPRYKEVLAALEVEEVDEGLPTVTPSEQTHAFAQADGLWRDQLRMAINIEHLGVDDLDWVADGCPAEDIRKKLDELFASWVGHLVRGERAPARSHQPAAGVTNPSRELDPRRRRRAQYSAIQHLYGRKPSAAAHKVLDGSWECGDPVPTPTLEDFRMAWQPIFETPSIKDNRRPTCVGQVRWEIVSPVTPGELEKVLTEGASSAPGPDGVKLKDVIGLGIGELCSHFNLWLLCGSQPSAMCVGRTIYIPAGSESNDALKYRPITIASHILRVFHKIMARRFDAFLPLKYTQKGFRSGDGIAQHVLSLQAIIDGAKRQRKPVNLVFLDVRKAFDSVSHDTIVLAMRRLGCPDPFLSYIRDLYSRSSTVIEHNGERSAPIFTRRGVKQGDPLSPFMFNAVIDWAFSSLDDHVGFSFGHVRVNNLGYADDVALLSDTRAGLRSQLGKFESHLAKGGLTISAGTEGKSSSLSIVVDGKAKRWVVDQTPFLATNEGIIPSLSASGEYRYLGIMLGSGGAKVRSSLREELLQGLQNITRAPLKPYQRMRILRNFLLPKYLHELVLAPVADGWLNWLDTAIRANVRQWLKLPQDTPVAFIHAGTGDGGLSVPSLRYSVPVMRRKRLEAVHSATDPLSTALTASPFFQKELSGLSRKTLGGRLVTDKQSLAQAWAGCLYTKVDGRGLSEARSCAEGSRWVSNPPRNQSGANYIGAIKARGGLLYSKVRSARGDSGRDVRCDSCMRPETAQHIIQVCPRTSGPRMRRHDRVVQFVSAAAERAGYKVLVEPRIVGRTLGVRKPDLVLWNESRAYVADVTITSDQVGGVKAHRDKVAYYDQPEIREWVERFTGLSHISFSAVAANWRGVLSPLSADFLKSVLKLSNWDISLLGLRICEETYHIHRYFGRSTYRVRGRGPS

SEQ ID NO: 2514 - protein, 1035 aa, synthetic construct
  source 1..1035: note = MG140-74_R387A
MFACGQCERTFGNKGALGNHCKWKHAQTRLPERTNGGEFPCPDCDNAYGSSGGLNVHRRARHPDVYHAARQPAARVKARWSYEELVLVARAELEIRGTNPPQGVVRVLHSRFPDRTFEAIKCLRNKNPRYKEVLAALEVEEVDEGLPTVTPSEQTHAFAQADGLWRDQLRMAINIEHLGVDDLDWVADGCPAEDIRKKLDELFASWVGHLVRGERAPARSHQPAAGVTNPSRELDPRRRRRAQYSAIQHLYGRKPSAAAHKVLDGSWECGDPVPTPTLEDFRMAWQPIFETPSIKDNRRPTCVGQVRWEIVSPVTPGELEKVLTEGASSAPGPDGVKLKDVIGLGIGELCSHFNLWLLCGSQPSAMCVGRTIYIPKGSESNDALKYAPITIASHILRVFHKIMARRFDAFLPLKYTQKGFRSGDGIAQHVLSLQAIIDGAKRQRKPVNLVFLDVRKAFDSVSHDTIVLAMRRLGCPDPFLSYIRDLYSRSSTVIEHNGERSAPIFTRRGVKQGDPLSPFMFNAVIDWAFSSLDDHVGFSFGHVRVNNLGYADDVALLSDTRAGLRSQLGKFESHLAKGGLTISAGTEGKSSSLSIVVDGKAKRWVVDQTPFLATNEGIIPSLSASGEYRYLGIMLGSGGAKVRSSLREELLQGLQNITRAPLKPYQRMRILRNFLLPKYLHELVLAPVADGWLNWLDTAIRANVRQWLKLPQDTPVAFIHAGTGDGGLSVPSLRYSVPVMRRKRLEAVHSATDPLSTALTASPFFQKELSGLSRKTLGGRLVTDKQSLAQAWAGCLYTKVDGRGLSEARSCAEGSRWVSNPPRNQSGANYIGAIKARGGLLYSKVRSARGDSGRDVRCDSCMRPETAQHIIQVCPRTSGPRMRRHDRVVQFVSAAAERAGYKVLVEPRIVGRTLGVRKPDLVLWNESRAYVADVTITSDQVGGVKAHRDKVAYYDQPEIREWVERFTGLSHISFSAVAANWRGVLSPLSADFLKSVLKLSNWDISLLGLRICEETYHIHRYFGRSTYRVRGRGPS

SEQ ID NO: 2515 - protein, 1035 aa, synthetic construct
  source 1..1035: note = MG140-74_I389A
MFACGQCERTFGNKGALGNHCKWKHAQTRLPERTNGGEFPCPDCDNAYGSSGGLNVHRRARHPDVYHAARQPAARVKARWSYEELVLVARAELEIRGTNPPQGVVRVLHSRFPDRTFEAIKCLRNKNPRYKEVLAALEVEEVDEGLPTVTPSEQTHAFAQADGLWRDQLRMAINIEHLGVDDLDWVADGCPAEDIRKKLDELFASWVGHLVRGERAPARSHQPAAGVTNPSRELDPRRRRRAQYSAIQHLYGRKPSAAAHKVLDGSWECGDPVPTPTLEDFRMAWQPIFETPSIKDNRRPTCVGQVRWEIVSPVTPGELEKVLTEGASSAPGPDGVKLKDVIGLGIGELCSHFNLWLLCGSQPSAMCVGRTIYIPKGSESNDALKYRPATIASHILRVFHKIMARRFDAFLPLKYTQKGFRSGDGIAQHVLSLQAIIDGAKRQRKPVNLVFLDVRKAFDSVSHDTIVLAMRRLGCPDPFLSYIRDLYSRSSTVIEHNGERSAPIFTRRGVKQGDPLSPFMFNAVIDWAFSSLDDHVGFSFGHVRVNNLGYADDVALLSDTRAGLRSQLGKFESHLAKGGLTISAGTEGKSSSLSIVVDGKAKRWVVDQTPFLATNEGIIPSLSASGEYRYLGIMLGSGGAKVRSSLREELLQGLQNITRAPLKPYQRMRILRNFLLPKYLHELVLAPVADGWLNWLDTAIRANVRQWLKLPQDTPVAFIHAGTGDGGLSVPSLRYSVPVMRRKRLEAVHSATDPLSTALTASPFFQKELSGLSRKTLGGRLVTDKQSLAQAWAGCLYTKVDGRGLSEARSCAEGSRWVSNPPRNQSGANYIGAIKARGGLLYSKVRSARGDSGRDVRCDSCMRPETAQHIIQVCPRTSGPRMRRHDRVVQFVSAAAERAGYKVLVEPRIVGRTLGVRKPDLVLWNESRAYVADVTITSDQVGGVKAHRDKVAYYDQPEIREWVERFTGLSHISFSAVAANWRGVLSPLSADFLKSVLKLSNWDISLLGLRICEETYHIHRYFGRSTYRVRGRGPS

SEQ ID NO: 2516 - protein, 1035 aa, synthetic construct
  source 1..1035: note = MG140-74_R397A
MFACGQCERTFGNKGALGNHCKWKHAQTRLPERTNGGEFPCPDCDNAYGSSGGLNVHRRARHPDVYHAARQPAARVKARWSYEELVLVARAELEIRGTNPPQGVVRVLHSRFPDRTFEAIKCLRNKNPRYKEVLAALEVEEVDEGLPTVTPSEQTHAFAQADGLWRDQLRMAINIEHLGVDDLDWVADGCPAEDIRKKLDELFASWVGHLVRGERAPARSHQPAAGVTNPSRELDPRRRRRAQYSAIQHLYGRKPSAAAHKVLDGSWECGDPVPTPTLEDFRMAWQPIFETPSIKDNRRPTCVGQVRWEIVSPVTPGELEKVLTEGASSAPGPDGVKLKDVIGLGIGELCSHFNLWLLCGSQPSAMCVGRTIYIPKGSESNDALKYRPITIASHILAVFHKIMARRFDAFLPLKYTQKGFRSGDGIAQHVLSLQAIIDGAKRQRKPVNLVFLDVRKAFDSVSHDTIVLAMRRLGCPDPFLSYIRDLYSRSSTVIEHNGERSAPIFTRRGVKQGDPLSPFMFNAVIDWAFSSLDDHVGFSFGHVRVNNLGYADDVALLSDTRAGLRSQLGKFESHLAKGGLTISAGTEGKSSSLSIVVDGKAKRWVVDQTPFLATNEGIIPSLSASGEYRYLGIMLGSGGAKVRSSLREELLQGLQNITRAPLKPYQRMRILRNFLLPKYLHELVLAPVADGWLNWLDTAIRANVRQWLKLPQDTPVAFIHAGTGDGGLSVPSLRYSVPVMRRKRLEAVHSATDPLSTALTASPFFQKELSGLSRKTLGGRLVTDKQSLAQAWAGCLYTKVDGRGLSEARSCAEGSRWVSNPPRNQSGANYIGAIKARGGLLYSKVRSARGDSGRDVRCDSCMRPETAQHIIQVCPRTSGPRMRRHDRVVQFVSAAAERAGYKVLVEPRIVGRTLGVRKPDLVLWNESRAYVADVTITSDQVGGVKAHRDKVAYYDQPEIREWVERFTGLSHISFSAVAANWRGVLSPLSADFLKSVLKLSNWDISLLGLRICEETYHIHRYFGRSTYRVRGRGPS

SEQ ID NO: 2517 - protein, 1035 aa, synthetic construct
  source 1..1035: note = MG140-74_F458G
MFACGQCERTFGNKGALGNHCKWKHAQTRLPERTNGGEFPCPDCDNAYGSSGGLNVHRRARHPDVYHAARQPAARVKARWSYEELVLVARAELEIRGTNPPQGVVRVLHSRFPDRTFEAIKCLRNKNPRYKEVLAALEVEEVDEGLPTVTPSEQTHAFAQADGLWRDQLRMAINIEHLGVDDLDWVADGCPAEDIRKKLDELFASWVGHLVRGERAPARSHQPAAGVTNPSRELDPRRRRRAQYSAIQHLYGRKPSAAAHKVLDGSWECGDPVPTPTLEDFRMAWQPIFETPSIKDNRRPTCVGQVRWEIVSPVTPGELEKVLTEGASSAPGPDGVKLKDVIGLGIGELCSHFNLWLLCGSQPSAMCVGRTIYIPKGSESNDALKYRPITIASHILRVFHKIMARRFDAFLPLKYTQKGFRSGDGIAQHVLSLQAIIDGAKRQRKPVNLVFLDVRKAGDSVSHDTIVLAMRRLGCPDPFLSYIRDLYSRSSTVIEHNGERSAPIFTRRGVKQGDPLSPFMFNAVIDWAFSSLDDHVGFSFGHVRVNNLGYADDVALLSDTRAGLRSQLGKFESHLAKGGLTISAGTEGKSSSLSIVVDGKAKRWVVDQTPFLATNEGIIPSLSASGEYRYLGIMLGSGGAKVRSSLREELLQGLQNITRAPLKPYQRMRILRNFLLPKYLHELVLAPVADGWLNWLDTAIRANVRQWLKLPQDTPVAFIHAGTGDGGLSVPSLRYSVPVMRRKRLEAVHSATDPLSTALTASPFFQKELSGLSRKTLGGRLVTDKQSLAQAWAGCLYTKVDGRGLSEARSCAEGSRWVSNPPRNQSGANYIGAIKARGGLLYSKVRSARGDSGRDVRCDSCMRPETAQHIIQVCPRTSGPRMRRHDRVVQFVSAAAERAGYKVLVEPRIVGRTLGVRKPDLVLWNESRAYVADVTITSDQVGGVKAHRDKVAYYDQPEIREWVERFTGLSHISFSAVAANWRGVLSPLSADFLKSVLKLSNWDISLLGLRICEETYHIHRYFGRSTYRVRGRGPS

SEQ ID NO: 2518 - protein, 251 aa, synthetic construct
  source 1..251: note = MG160-493_H230R
MSQKWTHRFEIKPGKWVFVPSDESRQHGKKIKKQIEKRWKPPDYYYHLRNGGHVAALKSHLNNKYFLRLDIKNFFGSINRSRVTRALKKFFSYEEAREIANESTVRHPNNKKYILPFGFVQSPILASLCLDKSALGRYLHKLNKNNGITVSVYMDDIIISSNDQEQLQEVLEEIKTAAEKSGFPLNEEKTQGPSDKITAFNIELSHGNLKITDERMNEFMEAYKNSNSERQREGILNYVRSVNPAQAEQLA

SEQ ID NO: 2519 - protein, 251 aa, synthetic construct
  source 1..251: note = MG160-491_H230R
MTQKWTHRYQLKPGRWVFAPTDEAKKTGARIKRAVEAHWKPPNFYFHLRNGGHVAAVRSHVASKYFFRADLDDFFGRVNRSRVTRCLKSWFSYAEAREMASESVVKRPGHEGFVLPYGFVQSPILASLALDKSKLGSYLRKLNGRSDLTVSVYVDDIIISSDDESQLGEVAERLKQLADKALFPLSASKTEGPAEEVTAFNIELSHAALRITDERMAELRADYQSATSERSKAGILGYVDSVNPAQAASLK

SEQ ID NO: 2520 - protein, 251 aa, synthetic construct
  source 1..251: note = MG160-492_H230R
MTQKWTHRYQLKPGRWVFAPTDEAKKTGARIKRAVAAHWKPPNFYFHLRNGGHVAAVRSHVASKYFFRADLDDFFGRVNRSRVTRCLKSWFSYAEAREMASESVVKRPGHNGFVLPYGFVQSPILASLALDKSKLGSYLRKLNGRSDLTVSVYVDDIIISSDDESQLGEVAARLKQLADKALFPLSASKTEGPASGVTAFNIELSHAALRITDERLAELRADYQAAASERSKAGILSYVHSVNPAQAASLK

SEQ ID NO: 2521 - skipped

SEQ ID NO: 2522 - protein, 469 aa, synthetic construct
  source 1..469: note = MG153-18_G161K
MRSQEGRRQQKAPEGAYLWEEMVKPWGTTGGPSPSSAQGGATPRGGQGSGLMEQVVERSNMLAALRRVERNGGAPGVDGIPTERLRDQIRAEWPRIREELLAGTYRPKPVRRVEIPKPGGGKRLLGIPTAVDRLIQQALLQVLTPIFDPQFSEASYGFRPKRRAHDAVRKARQYVEEGYEWAVDLDIEKFFDQVNHDILMARVARKVTDKRVLTLIRRYLQAGVMVNGVVIETGEGTPQGGPLSPLLANILLDDLDKELEKRGHKFVRYADDCNIYVKSKRAGERVMASIRKFLQERLKLKINEQKSAVDRPWKLKFLGFSMHKRKTGEILIRLAPQAIERVKGKIREITARNKPVSMAERIERLNTYLGGWIGYFALAETPSVFEEIEGWMRRRLRMYLWKQWKRVRTRYRELRALGLSEWVVHQFANARKGPWRMAHGPMNRALGNAYWQSQGLMSLTERYQSLRQA

SEQ ID NO: 2523 - RNA, 485 nt, synthetic construct
  source 1..485: mol_type = other RNA; note = MG140-74 5' UTR
tgcgttgaaggcaggcaagtggatagctctatagactactgctaaagattgctgagagtcgagctaaagtttggcataacaggtcagcattacagctagaaaggccagccaacttttaccatcttaactgactcattgctgagagtcgagctaaagtttggcataaaaggtcagcattacagctagaaaggccagccaacttttaccatcttaactcactcattccacttccactcttcgtaaatttcctctcaactgaccggaccttctcgtggttgcggaggttattagctggtacgtttaagcctttttccatccttgtgtagttccgttaggaactattcgtatcagtgaagctaacaggtcagtgctttagcattgtgaccagattttgaatcgatatattttaaagccttgtctctataaggctactggtcaccacttttttttgtttagttttcaacttggcgttttgtttttccgcg

SEQ ID NO: 2524 - RNA, 146 nt, synthetic construct
  source 1..146: mol_type = other RNA; note = MG140-74 3' UTR
ttccttgttggaaacgattataacgtcggccggttttcgggccaaatgctggagttcttttatcatttattcttttatctttttttgttactttattttttttcttttcttccttttcttaatgagtttgaacaaaggtaaataaa

SEQ ID NO: 2525 - RNA, 985 nt, synthetic construct
  source 1..985: mol_type = other RNA; note = MG140-88 5' UTR
ttcttcgcgccactcgcggcgtacgcacgcgtcggcacgcgctccgcagttttccgcgtttcttcgcggaaattcacgacgcagcgctctcaactacgcaacatcctgtagtgcttccgaccgcgcacccggcacacctaatctccgggcccacccgcgccgcgccagctaattacggcgtctttttagcttcccacgtgctcctaacccccaaatctccaacaataacaaacactaaatccagggcctcactcagtgcgcatttaccttaaatttcggccaccgtccagtgccgcatcaacgagaattggacttagccaattttcgtgcgcgctggacttagaaaattttcggtttgggaacttagaatatttttgggtgctgggacttaggaaattttcgagtctctggacttagaagattttcgacgtttcggcacttagaatattccgggttcctggacttagccgttttcgcggccgcgccgtgccctggatatccccagccgctcccgtcttcctggagcctcccagctcacccccataacccccaccccccaccaaccaccccccacccccccccaccacccccaccccccaaccaccccccacccccaccctcgtgggaagcttatcgcgagaaggtcatctgaaggtcaccaaccaaaatctcgtggtggcctctactcgacccgcctaacaacccccgcgggtccaaaaccttatcgcgcttgaatcctgggaggtcaaaatttctttggcttctcacgctgccgtccgaggtgatacggagtccggatcaacaaggctggtacattccaccgcgccccatcctctggcggtcttggatcgcccgagagacgcagtccagccatccctggcgcctccaccatcaccgggccatataccaccagcaagcccggcgcctccacttcagtcacttcggccattattagagagtccatccggctagtagctgtgacaat

SEQ ID NO: 2526 - RNA, 115 nt, synthetic construct
  source 1..115: mol_type = other RNA; note = MG140-88 3' UTR
attttctaacattacgctgcgcattctgtatttgtctttatatttattactatatgtatcacagttttttaacaaccgccatcagttgtacaagtcttgaataaataagatttta

SEQ ID NO: 2527 - RNA, 1117 nt, synthetic construct
  source 1..1117: mol_type = other RNA; note = MG140-3 5' UTR
cgaggtgtccctatccaccatcgggtttcagaaatcttccgaggacaacgtccgagtgctggctgtctggtctgtatgacttgggccaatcggtaaccgatagccgatcctccctgagggcaccacgttgcagccggtaactacagcggtctacctgttgtccatggcaatgggggaatggttgtaggctaactgtcccgggagcggcgatatcctacggtatgtgtcaggatctcgtcgaaggtagagaacatcctaccgaagcctgaatgaagggtaagttttgacttcctgacaggcggccttgacaggattcgcaccgaatcctcgaaaggtaagctgctgcgtccataacgcccgtggagcacagtcatactcggtgcgagctcatagttaacagtaatgatctcgtgtcgtcagccgcagaggggaatcacccgcggtaaccgaggggaactacgatccgtcgccattcctcgaggcccgaatgacctcagcgccacctgctaagggcaaccaaagctggtggcaatgagatgacgggaacaaataataagacctgctgttaacaggcaaggtgctagcctccatccaggctaaccctcaatcctgaagtgaaagggcggcaatcctttcatggaaggaggccctctaccgcgttcaaccgacggctaagggcagctaggcaaaatcactgagaccaaccagtcactatgattgagccggcaggggggcgggatcctgagtaccacgagttatcgggaccgtcctgagggattttccaaagcatcggggaaactctagcaatagttaacactattgatagagtcaaccgtagcacttaatagagacgactcgtggtcgccgggggccttcggtgggtacggacaccgactagccctcgcaggatgtggtcagtccacgtgaagtggaaccaactggccatgtctaagtggaaaggcaaacccttgccggggcgagctaagtacacaaccgatttcatccgggcgccgtacagcccgactcattcgtacatgataagtagggattcgttagtttcggtccatgcgtctggttttgggaacgtttttccggaaaaaacaccaggcgattacga

SEQ ID NO: 2528 - RNA, 189 nt, synthetic construct
  source 1..189: mol_type = other RNA; note = MG140-3 3' UTR
actagataattatttggtaactcttttatactttgttttgttaacaatagtttaaatttttcttttcagtctactaacctacttacaatagtattccttatatctgctgctgttaactgttatactgttgctgacattgaacaatggatcacttttgcttaaggtgaccattggtctttggaattgaat

SEQ ID NO: 2529 - RNA, 475 nt, synthetic construct
  source 1..475: mol_type = other RNA; note = MG140-8 5' UTR
ggcggagtaaggagccgtgttccgacgttgtgaaggctccacaaattagcccgtggcaaactccgcggtaggcagggctccgtgaagggcggtggaggatctccgtgggaggatttatccaaagatggagaccaccgtctgacacgttgaataggcctaaatctaccccagaccacctcctcgttggtgcaaccggtaactgcactcggtgcaggctgacggtcggggatagtcgtagagggaagcaatcgaaacctctatgttccttcagattcgcccgcggcagtgcccacgcttgggctagttaaactgctgccctgctaaggtagagcaggtgaatactctcccgggacctgtgggttgactcccccttgccccgttcctatgtgtcacagaaacaaatagatcgcaatctgcaaccgaggaaaatcttagccttggaacagatacagaggaccacgcgaccgtaggggtg

SEQ ID NO: 2530 - RNA, 179 nt, synthetic construct
  source 1..179: mol_type = other RNA; note = MG140-8 3' UTR
gaagaaaagaacggaaccgccacgtggaaacagggagaatggacatttcacctaatgacttctgacaggagaacgatgccgatgagatgaccacagcccgaaagtcgcagacgtaaaaggaatcagaagacgataccttccactctctatcctagcgcggatagatgagaaatagtaat

SEQ ID NO: 2531 - RNA, 392 nt, synthetic construct
  source 1..392: mol_type = other RNA; note = MG153-82 5' RNA
gggcgcgatcctggaggtgcaagtcctcccgtaagttggccacaacgagcgaagcgaagcgcaagggcggaagggcgaccgaccgtctggaggaagcgtggagcgtaaaccgcgagccgagggacacgaaccacatctgaggcgttgccggccagggcgagcaggcaggtgactgcgaagctctcgtggccaagggccaggcggcgtaaatgtggcggttgtgcggtgaaggatcgcgttcttacctggggagatctcgccttgcgcctgaaagggcgacgtcgcgtcagcggcggagcgagaagtcagccgaggccgtagtaggaggccgcagggccgccgaagggccgaacgtcaggaagggcaagacgcccggaggtctcgataccgtc

SEQ ID NO: 2532 - RNA, 316 nt, synthetic construct
  source 1..316: mol_type = other RNA; note = MG153-82 3' RNA
cctcaacctgacgaaccgcccggtgcggacccgcatgccgggtggtgtgggaggggacgccggggagacccggcgcccctatcccgattccggccccttcgccatcctggctacggggcctccaggacaccccggtctcggcaggatgtgcggatccaagtcgaacagcagtatgggcatgggcggggacaatttcgaagtcagaagctcaatcaaaggcggtcggtgccgataacgggagggaacagttcccggtccaccgcttgcaacgtggcgagatgggacccgattgcgacttctagcggaggagtctgcc

SEQ ID NO: 2533 - RNA, 834 nt, synthetic construct
  source 1..834: mol_type = other RNA; note = MG153-51 5' RNA
atatccccgcccccgccgctggacctacttacagcaacagggacggcccccgcgccgtccctgcctgtcgtacgcctggcaatcagtatcgctaaggggttagagtccccgacgcaccggactcagacggaagcgttagtgaacaggcactgcgtcgccgtgaggcggggtggggagggcctgggagcaaacctcggaacgaagcgcaagcgaaccagtgttggcggggtcccgggggcgacctggcgacagacagggaagcccaattactgaggaagcaccgggatagcgttaggatggtcggcttcgaggggaagcgatattgacgatccagggaggcctgccatggtccaagacccggtgttcatgtcatgaatggccgaagagccgggatggggtaatcggcggcaaggggcggcccaagcagccggtgatgccgtggcaggagtcagacgacccggtagtagtgattaagcccaggccgaagaaccccggcaacgggcgggaggggaaaacctggacgaccgccgtcttggtacggcggcggccgctggaccccaaaaggccagtggtcaggcgaagcggggaaccagcaggcaaatggtggaggatacggtacaccgagcgcgggatagagggacagcaaacctaacggggcgcaccgagaggcaccagcccaccgaaggcgggaggccgcctcaggtcagagggcgccgtccccgacctgagtactcacccggctaatacgttgtgcagcaacgacggtagccgaggaacggggaaggaacaggccgcgcggcgggcaaggccgggtccaagacgccaacgacgacg

SEQ ID NO: 2534 - RNA, 131 nt, synthetic construct
  source 1..131: mol_type = other RNA; note = MG153-51 3' RNA
gctgctggaggagccgtgtacgcggcccgtacgcacggttctgtgagaggggcggttaccccgcccctactcgatttgcggtcctggctatgtgtatcttgagaactctgtctctgtggtgctccccccgc

SEQ ID NO: 2535 - RNA, 535 nt, synthetic construct
  source 1..535: mol_type = other RNA; note = MG153-20 5' RNA
tccaccaatccaggatgaaccaaaacaaactaaccccatgacttgccgaaaaccaagtggttttcggcagtttgttgtgcgcccggcatgagtgtggtctatagggtgaaagtcccgagcgggggctggcgagcgcctaccgttagccgagagcaagggtgtccatcgtgaggtggaatctgaaggaagcttaaggcaaacgcttgacctgaggtacacgaacccaattcgaggctagactagccggatgagtctgcaacacaagacgaagtcctaagccgccaagggctaatctggtagattgggcaggtacatgagcggaaagtccacacccttacccggggaggtctgtacggaacgccatctgcagatggtaaccggtgtcgaaaggtgccgctgaacgtacagaagtcagcagaggccatagtaccttaacagggacgcctgaaaagggaagggccgaacgtcaactcaaggatgaatcagacgctttcgagaatcgatgtgttgaacgcagaattccggaaggaactgc

SEQ ID NO: 2536 - RNA, 105 nt, synthetic construct
  source 1..105: mol_type = other RNA; note = MG153-20 3' RNA
tgcggacccgcatgctaggtggtgtggggggacgggggttagtcgccccctcctactcgattttccttggccaaggttacgcatgaccggtacaggggtgacagg

SEQ ID NO: 2537 - RNA, 456 nt, synthetic construct
  source 1..456: mol_type = other RNA; note = MG153-18 5' RNA
attcaaatcaataaagagctggtcataatgaccagctctttacttatgcgtgcgcccggcatgggcgttaacttggtggtgaaagtccactgcaggcgaggcagcacgagtctgctagccaaaggcaagggtgtccgtcgtgaggtggagtctgaaggaagccggcggcaaaaccacggcccgatgaacaagaaccccatacgaggctaagccgttcggatgagttggcacaacacaacgaaatcctaggctgccaagggacggcggagtatatggggcgggcgcggggtgaaggttaacgctcttacccggggaggcctgccagataagccaggtagagctggtaacctgtgtcggaaggcacggctgaactggcagaagtcagcagagggcatagtaccctggaggtcatgaacttcaggggaaggcccgaacatcaagtgagaggtgggaccg

SEQ ID NO: 2538 - RNA, 245 nt, synthetic construct
  source 1..245: mol_type = other RNA; note = MG153-18 3' RNA
tgaaccgccggatgcggacccgcatgtccggtggtgtgagaggacgggggctagccgccccctcctactcgatgcgcccggtatgggtgaacgccgtgcggtgaaagcctgtcccctatcctgataatacgcctgataagttttgcgtttgattgacatatatccggttttctgctaatgttatatatgaacaaaagataagcacagccgaaaaacggaataaaattatacagggggtcatacat

SEQ ID NO: 2539 - RNA, 525 nt, synthetic construct
  source 1..525: mol_type = other RNA; note = MG153-5 5' RNA
caacaaaacattacggaaagcatctatcttcggataggtgctttttctagttcgcgcgccatgggcgcgctctaacgggtgaaagtcccgaacacgcctaggcaacgaggaagtgtatagctgaacagcaagggtgtccatcgtgaggtggaatctgaaggaagctgtaggcaaacccttggtccgacgaacaggaaccacatataaggctcggaaatacggataagtctgctagaagagatgaagtccaaaagttgtcggaagtacgagtaaatgtggcggatagatgaggggaaagagcgagcaccttaagcgtggaggtctcacagcggtttcattagccgagtaacaacgaactgtgagaagtcagcagaccccatagtagcgaggaagtttctgtaatggaaatggagtgaaggggggaacaatcaatcagttgaagtacgttccacttcgtagtcaaagcaacgtctgtcgataacgtcaaaggcggcaacgaccaaaggggcagaaaggaaacaacgc

SEQ ID NO: 2540 - RNA, 102 nt, synthetic construct
  source 1..102: mol_type = other RNA; note = MG153-5 3' RNA
ttgaaccgccgtgtaccgaacggttcgcacggtggtgtgagaggtcggaaatttctcgttacgagaaatttcctcctactcgattgtccaaaggaggtattt

SEQ ID NO: 2541 - RNA, 291 nt, synthetic construct
  source 1..291: mol_type = other RNA; note = MG140-1 5' UTR
gggtttttttatttcaaacgtctctagagataaaaataacttagggtcccttggctcagagtctcgacacgcaagtgtcaaagagtcagggtaaatgtcctgctagcgtacgtccgggagactgttcccacgtagagtcggttattggtatatagcacaaggagtatgtcagaaccctgtgtgaggatcatgagttaaatcatatctaattatatctcgagctaaaccgcgaacaggcaccacctcattgctcaagtcctggatgaaggtgtgtatgaaggcaaaacaatc

SEQ ID NO: 2542 - RNA, 478 nt, synthetic construct
  source 1..478: mol_type = other RNA; note = MG140-1 3' UTR
cgaatggcagaggccaggtagcttgaccgggtgtctgctctattatatgtgacggataagggtcgtaatagagcaagaatcatggcaaagattctttgtagagtaagcgtagtgctatccttatctagctggaccctgctagaaacggtccaatctattatatgagtcggatgggggtcgtaatagatttagaatcaggagattctatgtagcgtacgtgtaatgcgatccctgtctagagggtacccggctataaaaggggctggtagcgcaaagtgggaatcgatgattaaattattcccattggatcgttgtctaaaatagacaaactgtatcgacgcgtcactaatcgaatggcggatcagcttatggtccaaggaatgtgatgactcttgaaaattgagtacttgtactcgtattcaacctctctatccgtggtttgcacggagaattgcttaaacggtgtttttgtattaaa

SEQ ID NO: 2543 - RNA, 117 nt, synthetic construct
  source 1..117: mol_type = other RNA; note = MG140-4 5' UTR
cttctgttaacccgctacgtccggacgaaagtccacgtgagagtcggtaacaaggattcgtagtccttggctaaaagcgggaacggacaaggggctagcgacccccaattctcaaat

SEQ ID NO: 2544 - RNA, 159 nt, synthetic construct
  source 1..159: mol_type = other RNA; note = MG140-4 3' UTR
caccagaaagaggacgtagtggggatgtgtctgcttcagacagatgcattgcccagagtagatgtgacatgtgggaaggctcattatccgtggcgcactcctaccaacgtaatctctgcgtcatcagagagaaaatgatcgaaagatcatcaatccaaa

SEQ ID NO: 2545 - RNA, 141 nt, synthetic construct
  source 1..141: mol_type = other RNA; note = MG140-5 5' UTR
gtcgggatggcagaactacttccttgtagtccgacctgggcactagtcgtagtagactagtggcgaaacgttctgtccctcagcgttgggcgggagcgtatattcccagcgctgttgtattgtgcgcgttaattgcgaatc

SEQ ID NO: 2546 - RNA, 257 nt, synthetic construct
  source 1..257: mol_type = other RNA; note = MG140-5 3' UTR
cgagattgtactgtagccgtgaacggcggtgagtagcatcggagtcggtccccccgcactgggcacccgggaaattggttgctaactttccggaaagttataatgggaatcctcgtggtttatgttatgtttattatgtgattgttggacatgatgatattattgttttgttgttattataattgtgatttgatatatttgtttagtccatcaattgtattaatgtgttatttaccacttgagtgattaaaattctc

SEQ ID NO: 2547 - RNA, 830 nt, synthetic construct
  source 1..830: mol_type = other RNA; note = MG140-6 5' UTR
tactcaggtgatgcgcatttggtaaagggttacaagccagtggccagaatacacctcgtgaagagtctcaggactggattttatttttatcagagttactacccgtcgcagggtctctacgcgaacgttttgtgcatgatggagtcgcgtccctccgtcctcttcatacagcggccgagcgatcactggatggtgataatgttgccttggggtagctgctcggtatatagcctctggattccttagactgtaacatgcgttctcgttcgcgcccgtgtcaggtctacggactgtcagaatgttgtcggtcgagatccggtcgccttaacccaaaggcgtccggggaagagggaagtgcccatccctcggaggaaataatttccaagccaggagaccttcctagagcactagttgagttacgatttacctcaaaagggggacaaatgccggcctccacagagagtccagtgaatgggctcagccgtctacggcagggtagccgaagccttgagcaacccaaagtaagtgtcataccgcacccaacggtatgtcgcaaggcgtgacattaacgtcgtagggccctaggaggatagccctggaaagcacaactcttcgacgaggcccgtctgctattcctccccggtgactaaggaccgtaagccggagaggcctttggaaaatcaccactaggtcggtagctaggtttcctagcgccgaccggagcggcacacccgctcatcgggcccctaaaaaggctcaagtttgcatgggtcaaccccccctgtaaactaatcaactgggttactaacattgaaataaatattaggaac

SEQ ID NO: 2548 - RNA, 437 nt, synthetic construct
  source 1..437: mol_type = other RNA; note = MG140-6 3' UTR
tatgaggaggagccgcgccaccccgtggtggccggtccgagtatggttgggaccgtttctatttgtgacccgatctacggggtccttaaaaatactgagataatgttcgagggaatcgcctttatggtcggtcccggcccgggggggtccagtgcatagcgcgccgtcgcgtctatacatcgcgtacgtttggtttttcgtcggtttttggagaattacctgcgccgtggtcgtcatgcctcgttgcctcgtgtctcgttttgcgttcacgccgctcggtagtgcgtgaatgattgtgggtagtctcgttgatctgaatatgattaaactcatgacgtagaagtcactcaggtgccatgtatagagatgctaggattgtgcgatgtattgaatcataactcggggtacgggtatgattattaaaggaatcgaatact

SEQ ID NO: 2549 - RNA, 526 nt, synthetic construct
  source 1..526: mol_type = other RNA; note = MG140-7 5' UTR
ttctcgagccaagagaaacttctcaccagcgttagttaaggtacgaaatggccctcgggtctaccttgtcgggggtgcttggcctccacatagggcttacttcggtaagtccgtccacgcacggcagggaagccgttagccgtcatcgcaactcaaattagtcgaacggtgcagccaacaccgcaaggcgaggcgcttgtaggagcgtcgaagggtattggaatggatatcctcgaaggtgggatttctacgaggaaatactcaccattctttcccggatactggagccgatagtgtggaaagcacttggataaacaacaactggccgggcagcaaggtttccttgccccggcccggacgacgaactcgtccaccgggtccgtaaaacgacccaacgcttgcctggcctaatcagcccggttgtgcggttaaaacgtagattccgaagtataacgaaaacaaaggtgactcccccaggagtcgctctctgcgtgtcggagagcaaaatgcagccaatgccggcacc

SEQ ID NO: 2550 - RNA, 460 nt, synthetic construct
  source 1..460: mol_type = other RNA; note = MG140-7 3' UTR
aggtgagccgcgctgccgcaaggcagccggtccgagtatgcgtcggcgttggttgcgcaaatacgccctgagctcgagggctttataaatgcttgagctaatgtccccaaaaggggtcacttcattggtgcatgctgaccgcaaggggtcaatgcacggcgctctcggggaaccaaggtcgttggttgatccaaaaaggattatcgatgcgttccgagagacgcgattatgcatattattaacgattctattctcgaggatttgtccgcttctagacggacccatcctcgaccacgaatgaatcgaacggtgtgttccagtcgagtctcttgatccacgttgatttagcccgatggattggccactagcctgtcggttcttgagagagcgcagtgcatggattataattgccgagtcgcatgatccaatgaagtggtaagtgggaatcaggggataacac

SEQ ID NO: 2551 - RNA, 233 nt, synthetic construct
  source 1..233: mol_type = other RNA; note = MG140-10 5' UTR
gtaaacggcgggagtaacaatgactctcttaaggtatccaaatgcctcgtcaacgtttagtatagggaaaagcgcgggtaaacggcgggagtaactatgactctctcggatagggattggcagaactacctccacgttggtcctatccggggactagtcgtaatagactagtcgctaaacgttctgcccctcgccgttgggcggttgtttccagcggtgttgtatgtgcaaaa

SEQ ID NO: 2552 - RNA, 264 nt, synthetic construct
  source 1..264: mol_type = other RNA; note = MG140-10 3' UTR
gacagaacgtggatgttggcaactgtggttagtccagggtgtggacaaggttatatattgcatttttaccgcttatatgtgaggttcgtggccagaaggcccctatcattgcccctcagagcagatctgataatagggaatcctcgcaggctaactattatattatattgttttgcactgttatgttattactaatttgttgttgttatattgcattgtataattttataagttggattagcctgcttgagtgagtaaattctc

SEQ ID NO: 2553 - RNA, 244 nt, synthetic construct
  source 1..244: mol_type = other RNA; note = MG140-13 5' UTR
ttatatatttgaacggaagctggtctctcctatggaagctagctatgtgctggccggttcaaatagtggcactcactaacagctctatctcagggaaagtagatgagctcctgtgcatctggttccagcgatgaagaccttcagagacagtctaagccgacaacgtcagtgtttcggtattggaagctgtctgtcactgatgaaattctgaccgggaacggcataccagaacctgagtttccag

SEQ ID NO: 2554 - RNA, 159 nt, synthetic construct
  source 1..159: mol_type = other RNA; note = MG140-13 3' UTR
tatgaactaactagacaaatgtctccgataaccatgcactgattcactgttcgctgctcatttcatccgctcccagttctatgcattttctgatcatcatgacacccttgtgttgtccaacatcatgcacttttcagctcttgtgtagaatagttctcc

SEQ ID NO: 2555 - RNA, 420 nt, synthetic construct
  source 1..420: mol_type = other RNA; note = MG140-14 5' UTR
tgcgcgaacgcgtgtttgtcgtcgcagcgcactttacggaatttgggtctcggccgtcggtcgcccggctcggccggcggcggggctctgtgaacgaacggtctcgtggaacgagttggacacgtgtagtgtgttatcaaccagggtttgtttgcctgaaatgtgagacgtaggtggaggcgtctcaggggcgtgggtttgggccgtccgggagaaatccagtccctaccggctagaggggccgttagctgctgaaagtacctctgataccaaaaatgtccggtagcaaggttctcttgttgccgggcattgagacagcggtgtgaaagtctcaggggcgatggtatgggccgtcccgggaggatagccactacgaggtggtcctatcctgcccatcccggctaaaggagccgttagctg

SEQ ID NO: 2556 - RNA, 407 nt, synthetic construct
  source 1..407: mol_type = other RNA; note = MG140-14 3' UTR
cggtgagccacgctgtacggcattacagctggtccgatgataccacggggccgttccatttgtcttgatctcggagacgttaaataaactgagacaattttaagtctaccatgttacctcatgttcccgcccggcgggggtcgcggtgcgtcgcacctgtgtacatattttacggtctgagcgactcggctttgagtcacggccatgggttacgggttaccatactttgccacatacgctagtccttgcacgcccccggtggcgtgtgtggggcagtgggtctctcgcaatccgtgatgatttgagcccgtcgttgctaagctgtactttacggtagcgttaggtcgcgtcgaatcgcgattgtaacgccggtctcgggtacggttttgacaaggtacttaagcaaa

SEQ ID NO: 2557 - RNA, 190 nt, synthetic construct
  source 1..190: mol_type = other RNA; note = MG140-45 5' UTR
gcgccttctaggttgttaaaagtcagggccgtcccggtatcacgctaaatttacccgtggccctggggttatcacccccttacgaaccccatcagctacgaacacaataaatagcataactaaccttagggaaaactcatccccaacggtagtaacagatatatcgtctaatctgtgggtcctctatcct

SEQ ID NO: 2558 - RNA, 185 nt, synthetic construct
  source 1..185: mol_type = other RNA; note = MG140-45 3' UTR
cgcaactcgagctgacaaaggcggcactggtagaaccccagattggatcacacaattaggaccccatcgcaggtgtatggtgggtggggtcccactctccatcccaagacggccacattccgggcaagcccctgtactaatggggtaggtcgggtgtggttgtcaaggggtggatgagaaacaga

SEQ ID NO: 2559 - RNA, 430 nt, synthetic construct
  source 1..430: mol_type = other RNA; note = MG140-46 5' UTR
tccgacaataacaactggtaatggttttgatacaggtaaggaataggtaagtacagtttgagggttgacgtattcttttcgtccttcccaatggactgacctttccggtgtggctggattgtttgttgccagttatcagccatctttgagtccaacgccagtttggcatgtttacttagtaaacatctgaaaagatgacactgggacgacacttggccgggccttttactagtgttcgttagaattaagagactacgtccgcgaaattcacatcagttgattttccacgttgccccgggagggtgaagtagacttgttgttcttgtacggttcttctgaaagtattgtgtgtgggcaaccaaacataatagccgaggaggaacacgataggtagacaagtcgagtaactctgctaacagtctcgctcagt

SEQ ID NO: 2560 - RNA, 173 nt, synthetic construct
  source 1..173: mol_type = other RNA; note = MG140-46 3' UTR
atgggcaaggacaggacatttattgaacactctatcttggtaaaagttttttgttattctttagttttttgtatttgtctttatacctgtaatgtgattggatcatgaacatttcattttggtaattagtaagatgttttatgacggcataacatgatcgctacatccctatt

SEQ ID NO: 2561 - RNA, 684 nt, synthetic construct
  source 1..684: mol_type = other RNA; note = MG140-47 5' UTR
ttgagttgtagttgctggatcttggtctaagtcttaatcgcttggatcttggttcgcgtggctggcctcctcgtggtctcgctggaaacgtcagaaatgacggctaaacagccacttacttgagcccaccgtgttagtttgcagtagcctctgttaggtgatttcctaattgaattaccggcagtgtgcgactgggtatgttgtggtggtgtggctcagcgcgatgcgcaaactctagcgggtgtgatctagctatccggccagatcctaattctaatcacactgacctctggtctttgtgtgtgacagcccttctagcctctaatctgctggaagggaaccgcaggctgaaaacatatcatttatggcgacggctaatgtcactttggatctaaatccttctgctcggcaggcggctccccctagtattcacgggtgaaaccggatgaagaaacggcggtaaaatagctgtttgtcgggtacaaggtgtagtgtgggttggagggaactccggcctgcatacggccgcccgagtggtgaacaagacctcgggccctggtgaaactgtcgtaggagacggtgtcatatggtagtaccagcttcacctgatatggcagtagtagcggtcgtagtctccaaccccattgagccggggggggacctacgagagttctagatacaacc

SEQ ID NO: 2562 - RNA, 370 nt, synthetic construct
  source 1..370: mol_type = other RNA; note = MG140-47 3' UTR
tgtccaactagatcaagcctggcgacgatccctccgcactgattgggatgccggatcaaatgcagtacaaacgctctcctgagcttagttgcaccccccataactctgggtaaggtgtatggtcccccaatcagtgtttgagtgaggatgagccagtgaatattgtccaccggtgtacctgtagtacgtaattgtactactagacggacatttggtgagggaaacagcctcgtgatagattgtcgtgtgatagtgacagggtatcaatgattgcgataatacagccatgcgcgggccgaccagcgtgtttgcctcttcccgtcccgctttgcaggacgtaaacggtgcgaaagtagccgcatcgagaacc

SEQ ID NO: 2563 - RNA, 558 nt, synthetic construct
  source 1..558: mol_type = other RNA; note = MG140-54 5' UTR
cgactcgttgttgattaatagctttgtgatttccgcgcttttattcactcgagtgctacttggtgggttatagctactcgcgagcagtgagccctgaccgaacgtctctaggaaggggttcagccgtctgtcggatatccggacggtatctgctcgtgccaaaagggccacgctcttggatctcgtgaggtgtctcaactggtcttggttgggaaccgttcacgcacgagagcctttcgaggtgcattcctacgtggagtatctccaaaagctggcctaaagccttcctacctgttcaccttccataggtgcccgctgttaagctcttcggagtgaaccaaggaacaggaggtgggggtgagcgtaaggtgttcgggaccgtgccgaggcgcgtggcaaccgcacctaacaggttgtcgtgaacggcccccctctgctttgtggcgactgcagagtgatattgctggctcggaccttggggcggttggtggcccgagtcttgtgccttggaaccgcttgagttgacgcatcgtgggaaagcttgtatacaaaaccact

SEQ ID NO: 2564 - RNA, 254 nt, synthetic construct
  source 1..254: mol_type = other RNA; note = MG140-54 3' UTR
tgaaacagggccggaataaagacaggcgttcggagacgtagtcttgaaaagatgcaccaggaaagtctccctataacattctacttcgaggagactgtcacgggtacgctgtttttagtgcccggactcaattggtgaagcagtaaccagcaaggtctcccgagatgaagactatagatggagaccgttacgggcacgctgtttttagtgtccgaacaccaattggtgccatccgcgaccctgtctgaggtaac

SEQ ID NO: 2565 - RNA, 216 nt, synthetic construct
  source 1..216: mol_type = other RNA; note = MG140-55 5' UTR
cattttggccctctatcttttgggcctgtcgtttcacggcagagcctacccccaaccaccacaagggggaccacggccggcgggggagaaaaacaaaaggctaggccttccatcggggccaagaagtcaaattctggttcccaacccccgccacacgtctgtacgacgtgcgaggcaaccttccagacggaagccattctgaagagccatctgctc

SEQ ID NO: 2566 - RNA, 147 nt, synthetic construct
  source 1..147: mol_type = other RNA; note = MG140-55 3' UTR
tggctcctcccacccagctgagaccgcccatcgtcacgtctcattcgtgggacgcagcaacagagtgggggaagtttgcgaaggcgccttcgcgccgatatttttaacagcgattcaagctgaaatgtagccgtgtgttatttaacc

SEQ ID NO: 2567 - RNA, 170 nt, synthetic construct
  source 1..170: mol_type = other RNA; note = MG140-56 5' UTR
cgtcatcctctggctctcgttggagggtggcgaagtcggatgcacgcgccttgacgtggcggggagcttacttgactgattctgtggggcttgttctgtggacaagttcctatacggtttcggagattcaaaactaagcgtgcgacggcggacccgaataatgactaaaa

SEQ ID NO: 2568 - RNA, 263 nt, synthetic construct
  source 1..263: mol_type = other RNA; note = MG140-56 3' UTR
tcccagtctcggaaccgcgttcatgacaggttaaacccatggcagttcccgtccttcataaaggaactgtccagtgctaggcccgaaaggccattagctgggaagtccatgacctcgatcaccctgtccgttccggaagcgcgagtgtatgagctagctccagctttggagaaacatcaacctaaatggagcgaaaaccgtacgacctatatgattcgaggttgataacatcaaaacccaagtatgaggggagtacggggtac

SEQ ID NO: 2569 - RNA, 385 nt, synthetic construct
  source 1..385: mol_type = other RNA; note = MG140-59 3' UTR
tgccgccagtgcgcaaccttgcgggagccccatctgcagcgtccggggccatcttgacccgggacgccggtattcatcgtgatttttgtcctcgtcgaatgagattttggaattttgcacatcatctgccagcgtcctcgtcgtatatgtgttgagttggattggataagtgttcatgtttattctccttcataatcgcctttgttgctgtttgcttagtccctcttctgttggtggccctttcttttctttgctgtaatgtttattctagttatcttttggtatggtgctggggttgttttgagattgttgtgcggcggcacgtgttcggggcacgaaaatataaatactcggacgatcatcacatccgagaaattcacataaa

SEQ ID NO: 2570 - RNA, 186 nt, synthetic construct
  source 1..186: mol_type = other RNA; note = MG140-89 3' UTR
aactcctgacaaattgtcagaaagctagtaataggaaaggacagacccaaggaggcccggagcaaatacagggcgccaacagcatccgctcggctaccctctagcacggcccccccataaacacgggcgaccacacccaaaaatatcgtggaaagtgtagagatcctctgcgatccctatagaata

SEQ ID NO: 2571 - RNA, 2566 nt, synthetic construct
  source 1..2566: mol_type = other RNA; note = MG140-89 5' UTR
cccgtggatggatgacttgtcctaccagaacgccgccaatttttcaattcgtaccttacgatttgaaaaactttgtgcggacagagaacagccatggcagtgtctttcgctttcctaccaaaatgccgtcaaaaatttcgatttaagcggctagcgactgactttatactgcatggtcgtaccagaaatttcgctgtcctaccagaacgccgccaatttttcaattcgtaccttacgattttgataaacattgtgcggacagagaacagccatgcagtgtctttcgccttcctaccaaaatgccgtcaaaaatttcgatttaagcggctagcgattgactttatactgcatggtcgtaccagaaattttgttttcgaccaagcatccaaaccacaaaagattgcaaagatgactctcttaagagagctttaagactatcggttctgctcgatagggtggaaatactctgtcgagtaagcgaaaaaggcgtgaatgtacacacattagcgaacataaagcctctcacgctcaagtgccaacctcaccttccagcggtgctccccgttgacggccactggtcacggacgaggcaaatggcgaccgaaatacggggcgggatatccctacggtcatgatgcgaacatatagcctctctgacacatgtcaacatttgttggcgaccgagtataggcggtataaccttagtgtacacttgaacgctcacgagtacctcgatgaatcgggggaaagcatggtatccctgtccggcttgcgttgcagcggcggtgcagtggcaaatgcgcgagttatttggaccaccatatcctagagcatttagggaagatgggcatcttcggatgcctcgcactcccgggggcgtctcacagacgcaccttgagcgcatatactgcctcgctgcctttaaccgcccggacacaagcgccgggactcaataggctttcgtgtatcagcaaacggtgcgctttggccaccgactggcggaacacgtagcctgaaaaaatgcagataccaatcacttgaacgctcacgagtaccttgataaatcaggggaaagcaaacataaacatctagcgaggctgcggcccacttgatgtgtaacacttgaacgctcacgagtaatccgttctttcggatgaaagcatggtatttctgtccggcttgcgttgcagcggcggtgcagtggcaaatgcgcgagttatttggaccaccatatcctagagcatttagggaagatgggcttcttcggaagcctcgcactcccgggggcgtcccacgggcgcaccttgagcgcatatactgcctcgctgcctttaaccgcccggacacaagcgccgggactcgacaggctttcgtgtatcagcaacgggtgcgctttggccacccactggcagaacacgtagcccaaaaataccagtcacttgaacgctcacgagtactccgattaatcggacgaaagcaaacacggagtatatttgtccagcctgtgttgcagcagcgacaagttgaggcgcacctaaagcatttatgcttccttgctgccttaacccgcgcgcacataggtgctgggacttgaagggtcttcgcgtatcagccgcgcgcgcactgccgccgcgagcagagacacgttacctataatacccgtcgtgcgctcatcacgcatactcttcttcaagggtatgcaagagaggcacgtaaaatttgtccggtttgtggtgccgatcgcgctgccttgagccgcacgcacacgaacgtcgggactaacgggggctttcgcgcatcagccgcgcgcgggcatcggccgccgctggcgtaagcacgtagccttattatatccccatgcagaattgagagcgaaacgatgcaagcatcgagtggccactaggggcgataaacaacacaggccatgttagcgaaaacggttgactttgaaaccagagctgtagtctctccttcagtagctccgaggtgaaatgtatccgaaggcttttgttgcttgaagagggggatgcatgcaaaggtgataaaaaggattccgtcggaactttcatgcctgtcaaacaaagaggctggggcacaagccaagctcgctgcccaaagaacatagttctcaaataatgccccagcccaggccactactttcaatctcacaaagagcttctagagtctcaagactcagcaaaacagaaagttagcccggccatgccgcggccaacacttacatacgttgaggctcgaacgtagtctaccaccgactaaatttaaaacggggcgcagtacccgggcaaacagtttccacgctgtgtctcggcgttcttaaacccctgttaaggggattcgattcgtcaaaagcggtcgaaacccctgggcgtatgccaaaaaggactctcactatcgaaaccaccacttggcaacgtacccggcatgccccctcggtatagctggtgccggggggcgctatcgaaaaggagtacggttcaacccggccgtactataaacctcagttagggtgaatggggggccccaccgcagtgggcaataaacaagt

SEQ ID NO: 2572 - protein, 4 aa, synthetic construct
YADD

SEQ ID NO: 2573 - protein, 4 aa, synthetic construct
YIDD

SEQ ID NO: 2574 - protein, 4 aa, synthetic construct
FADD

SEQ ID NO: 2575 - protein, 4 aa, synthetic construct
FVDD

SEQ ID NO: 2576 - protein, 4 aa, synthetic construct
FIDD

SEQ ID NO: 2577 - protein, 4 aa, synthetic construct
FLDD

SEQ ID NO: 2578 - DNA, 76 bp, synthetic construct
  source 1..76: mol_type = other DNA
ccctagctttagctatggggagtatgtcaaatctccagtgggttaaatttaagccagccccgacacccgccaacac

SEQ ID NO: 2579 - DNA, 107 bp, synthetic construct
  source 1..107: mol_type = other DNA
tggggattgggtagcagttcggcgcaacttatcacgcgtggcgtaatacccctgcctttaggcatgggggggcagagcgcacatcgcccacagtccccgagaagttg

SEQ ID NO: 2580 - DNA, 2101 bp, synthetic construct
  source 1..2101: mol_type = other DNA; note = MCP-RT-GFP-Normalintron-MS2
gatatccctaagaagaaaagaaaggtgtgactagctggccggccgtgcgttttattcctgtctttttattgccgatccccgcgatcgcttacttgtacagctcgtccatgccgagagtgatcccggcggcggtcacgaactccagcaggaccatgtgatcgcgcttctcgttggggtctttgctcagggcggactgggtgctcaggtagtggttgtcgggcagcagcacggggccgtcgccgatgggggtgttctgctggtagtggtcggcgagctgcacgctgccgtcctcgatgttgtggcggatcttgaagttcaccttgatgccgttcttctgcttgtcggccatgatatagacgttgtggctgttgtagttgtactccagcttgtgccccaggatgttgccgtcctccttgaagtcgatgcccttcagctcgatgcggttcaccagggtgtcgccctcgaacttcacctaaggtgagtccaggagatgtttcagcactgttgcctttagtctcgaggcaacttagacaactgagtattgatctgagcacagcagggtgtgagctgtttgaagatactggggttgggggtgaagaaactgcagaggactaactgggctgagacccagtggcaatgttttagggcctaaggaatgcctctgaaaatctagatggacaactttgactttgagaaaagagaggtggaaatgaggaaaatgacttttctttattagatttcggtagaaagaactttcacctttcccctatttttgttattcgttttaaaacatctatctggaggcaggacaagtatggtcgttaaaaagatgcaggcagaaggcatatattggctcagtcaaagtgggggaactttggtggccaaacatacattgctaaggctattcctatatcagctggacacatataaaatgctgctaatgcttcattacaaacttatatcctttaattccagatgggggcaaagtatgtccaggggtgaggaacaattgaaacatttgggctggagtagattttgaaagtcagctctgtatgtgtatgtgtatgtgtatgtgtatgtgtacgcgcacgtgtgtttgtgtgtgtgtgagagcgtgtgtttcttttaacgttttcagcctacagcatacagggttcatggtggcaagaagataacaagatttaaattatggccagtgactagtgctgcaagaagaacaactacctgcatttaatgggaaagcaaaatctcaggctttgagggaagttaacataggcttgattctgggtggaagctgggtgtgtagttatctggaggccaggctggagctctcagctcactatgggttcatctttattgtctcctttcatctcaacggcgcgggtcttgtagttgccgtcgtccttgaagaagatggtgcgctcctggacgtagccttcgggcatggcggacttgaagaagtcgtgctgcttcatgtggtcggggtagcggctgaagcactgcacgccgtaggtcagggtggtcacgagggtgggccagggcacgggcagcttgccggtggtgcagatgaacttcagggtcagcttgccgtaggtggcatcgccctcgccctcgccggacacgctgaacttgtggccgtttacgtcgccgtccagctcgaccaggatgggcaccaccccggtgaacagctcctcgcccttgctcaccatggtggccctgcaggctgtgttctggcggcaaacccgttgcgaaaaagaacgttcacggcgactactgcacttatatacggttctcccccaccctcgggaaaaaggcggagccagtacacgacatcactttcccagtttaccccgcgccaccttctctaggcaccggatcaattgccgacccctccccccaacttctcggggactgtgggcgatgtgcgctctgccctggcctgcagacatcaaagttttagagctaggccaacatgaggattacccatgtctgcagggcctagcaagttaaaataaggctagtccgttatcaacttggccaggactgaggattacccagtctatctgcagggccaagtaaaaaaaaaaggaagggaaaaggg

SEQ ID NO: 2581 - DNA, 1333 bp, synthetic construct
  source 1..1333: mol_type = other DNA; note = MCP-RT-GFP-Chimericintron-MS2
gatatccctaagaagaaaagaaaggtgtgactagctggccggccgtgcgttttattcctgtctttttattgccgatccccgcgatcgcttacttgtacagctcgtccatgccgagagtgatcccggcggcggtcacgaactccagcaggaccatgtgatcgcgcttctcgttggggtctttgctcagggcggactgggtgctcaggtagtggttgtcgggcagcagcacggggccgtcgccgatgggggtgttctgctggtagtggtcggcgagctgcacgctgccgtcctcgatgttgtggcggatcttgaagttcaccttgatgccgttcttctgcttgtcggccatgatatagacgttgtggctgttgtagttgtactccagcttgtgccccaggatgttgccgtcctccttgaagtcgatgcccttcagctcgatgcggttcaccaggtaagtatcaaggttacaagacaggtttaaggagaccaatagaaactgggcttgtcgagacagagaagactcttgcgtttctgataggcacctattggtcttactgacatccactttgcctttctctccacagggtgtcgccctcgaacttcacctcggcgcgggtcttgtagttgccgtcgtccttgaagaagatggtgcgctcctggacgtagccttcgggcatggcggacttgaagaagtcgtgctgcttcatgtggtcggggtagcggctgaagcactgcacgccgtaggtcagggtggtcacgagggtgggccagggcacgggcagcttgccggtggtgcagatgaacttcagggtcagcttgccgtaggtggcatcgccctcgccctcgccggacacgctgaacttgtggccgtttacgtcgccgtccagctcgaccaggatgggcaccaccccggtgaacagctcctcgcccttgctcaccatggtggccctgcaggctgtgttctggcggcaaacccgttgcgaaaaagaacgttcacggcgactactgcacttatatacggttctcccccaccctcgggaaaaaggcggagccagtacacgacatcactttcccagtttaccccgcgccaccttctctaggcaccggatcaattgccgacccctccccccaacttctcggggactgtgggcgatgtgcgctctgccctggcctgcagacatcaaagttttagagctaggccaacatgaggattacccatgtctgcagggcctagcaagttaaaataaggctagtccgttatcaacttggccaggactgaggattacccagtctatctgcagggccaagtaaaaaaaaaaggaagggaaaaggg

SEQ ID NO: 2582 - protein, 33 aa, synthetic construct
  source 1..33: note = MG160-4_Inactive
HRYQLKPGRWVFAPTDEAKKCGAHIKRSVASRW

SEQ ID NO: 2583 - protein, 26 aa, synthetic construct
  source 1..26: note = MG160-4_Inactive
APNFYYHLRNGGHVAAVRSHELSRFF

SEQ ID NO: 2584 - protein, 64 aa, synthetic construct
  source 1..64: note = MG160-4_Inactive
RADLDDFFGRVNRSRVTRCLKPWFSYAEAREMASESVVKRPGETAFVLPYGFVQSPILASLALD

SEQ ID NO: 2585 - protein, 118 aa, synthetic construct
  source 1..118: note = MG160-4_Inactive
SKLGSLLRSLDGGRDFTVSVYVDDIIISGDDEAQLKEVASRLERVASEALFPLSSGKTQGPASGVTVFNIELSHRMLRITDDRLASLRLDYQATASERCKAGIVSYVYSVNPDQVAQV
